United States Patent Application Publication US 2026/0357256 A1 - sequence listing, part 9

SEQ ID NO: 9 - DNA, 58617616 bp, Homo sapiens (residues 17,368,185-19,539,207 of 58,617,616)
  source 1..58617616: mol_type = genomic DNA
cctcagtctccctagtagctgggattacaggcacgcaccaccatgcttggctaatattgtattttttagtagagacagggtttctccatgttggccaggctggtctcaaactcccatcctcaggtgatccgcccacctcggcctcctaaagtgctaggattacaggtgtgagccaccgcactcggccgaactaatttttgtatttttagtagagacagggtttcaccatgttggccaggctggtttcaaactcctgacctcaggtgattcgcccccctcggcctcccaaagtgctgggattatagtcgtgagccacctctcctggcagaagtagggtctttagagaggtaattaagttaaggtgaggtccttagggtgggtcctaatccaacatgactgatgtccttataaagagaagagatttggacacagagacacggacagaaggaagaccaagagcagacacaggaagaagatgccacctgcaagccaagtagaaagacctggaacaggccggctatggtggctcacgcctgtaatcccagcactctgggaggccaaggcgggtggatcacgaggtcaagagttcaagagcaacctggccaagatggtgaaatcccatctctactaaaaatacaaaaaaattagcagggcatgttggtgggcacccgtaatctcagctactggggaggctgaggcagagaattgcttgaactcggggaggcggaggttgcagtgagccgagatcgcgtctctgcactccagtccagcctgggtgacagagcgagactccgtctcaaaaaaacaaacaaacaaacaaaaacctggaacagatccttccctcacagcctcagaaggaaccaaccccgctaacactttgatcttggtaccacccagtctgtaataccttgtcatggaagccctagcaaattaatacaaatgctaacaccatctcatgaggcaaacaacagtctttaaaaaaaacctttttttgtttttttttttgttgttgtttttgagacagggttttttgctctgtcacccagcctggagtgcagtggcacgatctcggctcactgtaacctccgtctcccgggttcaagtgattccccagcctcagcctctcgagtagctgggattacaggtgtgcaccaccatacctggctaatttttgtatttttagtagagacagggtttcgccatgttggccaggctggtctcgaactcctaacctcaagtgatctgcccaccaccagcctggccaacatggcgaaaccccatctttgctaaaaatacaaaaattagccaggcatggaagcgcatgcttgtagtcccagctatttgggagtctgagccaggagactcgcttgaatccgggaggcggaggttgcagtgagatgagattgtgccaccacactccaacctggggaacagagtgagactctatgtccaaaaaaaaaaaaaagaaaaattaaaattaaattaaataagatatgcaaatggccaaagagcatatcaaaagacattcaaaatcggctgggcgcggtggctcacacctataatcccagcactttgggaggccaagacaggtggatcacctgaggttgggcattcgagaccagcctggccaacatggtgaaaccccatctctactaaaaatacaaaaaaattagccaggcctggtggcaggtgcctgtaatcccagctacttgggaggctgaggcagaagaattgcttgaacccgggagatggaggttgcagtgagccacgatcacaccattgcactccagcctgggtgacagagcgagagtctgtctaaaaaaaaaaaaaaaaaaaaaaaaagaaagatattcaaaatcattagccattacggaaatgcaaatcaggaccacagtgagataccactacacacccacgagggtggctattttaaaaacccataaacccccaaaatgaacagtaacaggtgttgatgaggatgtggggaaatcagaattctcagacagtactagtgagaatgtacaatgttgcaacggctttgggaaagtctggcagttcctcaaaatgttaaacatagttaccacgtgacccagaaactctacttctcagcatatacccagagcaatggaaacacatcctcacatcaacttgccaggaatgtccacagccgctcgattcacagtagccaaaggtggaaagaacccaaatgcctgtcagcagatgaattaacgcacaaaatgtgttccttccatacatagaacatgattcagccataaaaaggaaggaagcactgatccatgttgcagtgtgtgtgaaccccaaaaacatgatgcctaagtgagagaagccggacacaaaaggccacagaatgtgagattccactgacatgaaatgcccagaacaggcaaatccatagagacaggaagcaggttggtggctgtcagggattgggggaggggaatgggaagtgactgctgatggggacgtgggttttcttttgggaaggtgaaaatgttctaaaataatgttctaaaatggatcgtggtgatcaatgtacaactctgtgaatttacaaaaaaatcatcaaattggctgggcgcggtggctcacgcctgtaatctcagcactttgggaggccgaggcgggcggatcacgaggtcaggagatctagaccatcctggctaacacggtgaaaccccatctctactaaaaatacaaaaaattagccaggcgtggtggcgggcgcctgtagtcccagctactcgggaggctgaggcaggagaatggcgtgaacctgggaggcagagcttgcaatgagctgagatcgcgccactgcactccagcctgggcgacagagcgagactccatctcaaaacaaacaaacaaacaaacaaaaacatcaaattgtacactttaaataggtggattgtaaaatacatgaattatatatcaataaagctgtttttaaaaattatttattattattattattattgagatggagtctcgctctgtggcccaggctagagtgcagcggtgtgatctcagctcactgcaacctctacttcctgggttcaagtgattctcatgcctcagcctcccaagtagctgggaatacaggggtgcaccaccatgaccagctaatttttgtattttagtagagacggggttgcaccatgttagccaggtggtttcgaactcctgacctcaagtgatccactggcctcagtctcctgccttgacttcccaaagtgctggaattacagacgtgagctgccacgcccggccagctatttttattttaatttaattttattttttttgagacatggtctcactctgccacccaggctggagtgtggtggtgtgatcacagctcactgcagcctcagcctccccaggctcgggcaatcctcccacctcagtctctcaagtagctgggattacaggcacgtgccaccactcctggctaattttttatagagatggggtctcaccatgttgcccaggctggtcttaaactgctgagctcaagcaatccacccaccttggcctcccaaaatgttgggattacaggtgtgaaccaccacgcctggccagcaaagctgtttttaaagaaagtgttcacaatttaacaaactaaagccatgcctttcaaactttggaagagaaccctctgcagaaatataataagacatgaagaatcaggagagtttgtctttctgcaactctctgtccttcatccttttgcagttggccctgggtgaatgtcctggggggacatggggaatgccttctgttctcaaaagccttagtcattaggaggctgaggtgggaacactgcttgaggctgggagttcgagaccagcctcggcaatgtagtgacaccatgtctctaaaaaaaaaaaaaaaaaaaaaggatgtgatttttaagtttcttttttaatttttagtttattttttatagagaagaggtgtcttgggaggctgaggcaggtggatcacctgagatcaggagttccagaccagcctggccaacatggggaaaccccatctctactaaaaatacaaaaaattagctgggtttggtggcgggtgcctgtaatcccagctactcgggaggctgaggtaggagaatcacttgaacccgggaggcagaggttgtagggagctgagattgcgccactgcaatccagcctgggcgacagagtgaaactctgtgtcaaaaatagtaataataataataaaataattaaataatgtttttatttatttatttatttattttttgagacggagtctcgctctgtcgcccaggctggagtgcagtggcgcaatctcggctcactgcaagctccgcctcccgggttcatgccattctcctgcctcagcctcccgagtagctgggactacaggcgcccaccaccacacctggctaatttttcgtatttttagtagagacggggtttcactgtgttagccagcatggtctcgatctcctgacctagtgatccacccacctcggcctcccgaagtgttgggattataggtgtgagccactgcacccggccaataatttttttttaaatgaaaagacaggccaggtgcagtggctcacacctgtaatcccagcactgggaggccaaggcgggcggatcacgaggtcaggaaattgaggccatcctggttaacatagtgaaaccccgtctctactaaaaatacaaaaaaaaaattagcagggcatgttggcgggcacctgtagacccagctactcgggaggctaaggcaggggaattgcttgaacccaggaggcagaggttgcagtgagtggataccgcgccattgcaccccagccttggcgacagagctagactctgtctcaaaaaaaaaaaaaaaaaaaaaaaaaaaagaaagaaaagacaccagttagccaggttcaggtctgagaggggaggcagggctctaatctgaggatctaaggggcaggcaggaccctattgggagggtctgagggaggggcacagttatgccctggggactgaggggtgttccaccccatcttggggggctgaggtgagacctaccatactctgggcatctggggagacggtgctttgccccggggttttggcggatagagacagggccctacccctggggctctgggcgaggggttgaggtggaggtagggccccgccattaggggtctgaggtgaggagactgagttctgccttgagcaggactgagggggctgagcttaccttcctgcccagtgcggacggctgggtggtctgaggtcctatgggaggtctgtctttgccactgcctgggccctggccagccaggtcacctccttggaagaccctgaagctgcctcttcagccttccctcaccccaccctcccatctctcacccacctcacccttaaggagagagccccacacctgctccccacaatgtctcagggcaggcgggacaccccctggatgaagttgtgtctgagaacacggggataattgtctagtgagtttgacacaagccggggtgcgagagtggcgcgatggtctccaggagaccccagatttgcagctgtgactttgcccagagagcccgcctgtttctgccacctcaagaaagtcacctcccctctcatgccttcactttcctgcctgcaaagggtttaaaacttctgctgcccaggcgcaatggctcactcctgtaatctcaacactttgggaggccaaggcaggtggatcacttgaaggcaggagtttgagaccagcctggccaacatggtgaaaccccatctctactaaaaatacaaaacttagccgggcatggtggggcgcacctgcaatcccagctactcgggaggctgaggcaacagaatcgcttgagcctgggaggcagtggttgcagtgagccgagaccttccactgcactccagccttggcaacagagggagaccctgtctcaaacaaaacaaaataaaacaaaacagccgggaacggtggctcacgcctgtaatcccagcactttgggaggccgaggcgggtggatcacagggtcaggagatccagaccatcctggctaacacagtgaaacccggtctctactaaaaatagaaaaattagccaggcatgacggcgggcgcctgtagtcccagctactcaggaggttgaggcaggagaatggtatgaacgcagaaggtggggcttgcagtgagccgagactgcgccactgcactccagcctgggtgaaagagtgagactccatctcaaacaaaacaaaacaacaaaagcttctccctacttcccgggatttggcaatgagttaatatttctaaattcaacacccagcatacagcaaatatggactgtttatacatgctagaattgaacaggaacaaaacactgtgaacttttattcagtccatcctttttttgtttttttttttccattcagggtctcactcagtcgcccaggctggagtacagtggcactatcttggctcactgcagccttgacctcctgggctcaagtgatcctcccacctcagcctcccaagtagctgggactactggcatgtgccaccatgcctgactaatttttgtatgtatgtatgtatgtatgtatgtatgtatttatttttagacagagtctccctctgttgcccaggctggagtgcagtagtgagatctcggctcactgcaatctctgcctcccaggttcaagtgattctcctgcctcagcctcccgagtagctgggactacaggcacataccaccatacccggctaataatttttgtatttttagtacagacggggtttcactaggttggccaggctggtctcaaatttctgacctcaagtgatccacccaccttggcctctcacagtgctgggattacaggtgttagccagtatgcctggcctaatttttgtactttttgtacagacagggtttcaccatgttgcccaggttggtctcaaattcctggactcaggtggtcctcctgcctcggtctcccaaagtgctgggattacaggtgtgagctactgtagccggtcttcagccacttatttgcagcttgtgtgtgctggacccctttgattagtgctggcacattctgggagcttcatgcatagtaagttatgggctcaggactgccaattaacacacaggaggagaattaaacttggattccaaaaagacaatgaatattattttcaaaattatatctcaaatattgcatggaatatacttacagtttaaaaaaaatgttgctggctgggaatggtggctcatgcctgtaatctcagcactttaggagggtgagcctaggagttcaagaccagcctcagcagcatagtgagattctgtctctaaaaaaaagttagccagggcaccaggtcagggcacggtggctcatgcctgtaatcccagcactatgggaggccgaggtgggtggctcacttgaggtcaggagtttgagaccagcctggcaaacatggtgaaaccccgtctctactaaaaatacaaaaattagctggcatggttgcacacgcctgtaatcccagctactcaggaggctgaggcaggagaatcacttgaacctgggaggtggaggttgcagtgaggcgagattgtgccactgcacttcagcctgggtgacagagcgagactccgtctcaaaaaaaaaaaaaaaaattgccaggtgtggtggtgcccacctgtaatctcagcactttgggaggtccaggagggaggattgtttgagcccaggagttcaagaccagcctgatcaacatagcgagaccccacgtctactaaaaataaaaaatgacctgggcatagtggcatgtccatagtgccagctactcaaaaggctgaggcaggaggattgctggagcccaggatgtcaaggcttcagtgagctatgctcacatcactgtgctccagcctgggtgacagagtgagaccctgcctccaaaaaaaagaaaagaaataaaaaaaatttagctggacgcagtgccccacacctgtaatcccagcagtttgggaggctggggtgagaggattgcttgagcccaggagttcgagactagcctgggcaacatagtgagacctcatctctgctaaatataaacatattagctgggtgtggtggtgcacgcctgtagtcccagctactcaggaggctgaggcaagaggatcacttgagtccaggagattgaggttgcagtgagctgtgatagcaattgcactccatccagcccaggatacacatggagaccctgtctcttaaggaaaaaaaaaaaatctatcggccgggtgcagtggctcacgcttgtaatcccaacaatttgggaggccaaggcaggcgtatcacttgaggtcaggagtttgagaccagcctggccaacatggtgaaaccccatctctactaaaaatacaaaaatgagccggttatgatggcacatgcctgtaatcccagctactcgggaggctgaggcaggagaatcactccaacccaggaggcagaggttgcagtgagccgagattgcaccactgcactccagcctgggagacggagcgagactctgtctcataagaaaagagagcattggtcctgtgatcgtccccctctcttggatgaggaaactcaggctcagagaggtgagggggcttgctcagggtccccagggcgagtgtcctgcccacagccttacccggtcaccctggcactggcggaagctggcattgatgcggtccaggtcgcggcgagcattcagccacatctgcatgatggcatccttggcgcgggtggtgaagttgagctccttggtcaagttggactgggaggccgtgagccctaggagctgactgtataggccctcggctcggcgctcggtggcctgcaggttggactctgtgctcacgtgcacgttgccatagaccatgaagagcacgagccccaggatgatgaggaattggatgagggagacgaagaggaagaagtagcgcaggtaataccagcagccccgagagctgccccccgcccgagcgtaggaccctccgtgctccatggccagacccatttgctcgatcccgccgtccggtgcaccgtccctgctcaccaccaggcctgctctggcccccgcctcgcaggggggagtgcttatattactcctcttaatacttcctctgcctggctccttcctggcccggaggaaacgggggctgcgggttatcacaacactcccactctggctgtgagaaggcgggggtggggctgggggcccagagccagggcaccggctggacccctctgattaatgctgggtggggcgctggctggctggtcaggcattcctggcctcttcgagcctcgcgttcgcctttacttgctggcgggtgctgttctcagtacctgctgtgattaggtcgctgaatcatgccaggtctgttgctgtctcccttgtgtggcggaggaaactgaggcacagggaggagaaggggttgcctcggggtctcacgctgttagttcagcgaacttgacttacctcaagacaggctggctacagacgtgcacccacttcaccagggcggtgctgattaagtgccacaaaacgtgggaaatgtgccaggcacggtggctcacgcctataatcccagcactttgggaggctgaggcggacggatcacctgaggtcagaagtttgagaccaacccggtcaccgtggtgaaaccccccgtctctactaaaaatacaaaacttagccaggtgtggtggtgctcgcctgtaattccagctacccaggaggctgaggcaggagaatcgcttgaacccaggagtcggaggttgcggtgagcagagatcgtgccattgcactccagcctggggtatagagcaagactctgtttcaaaaaaaaaaaaaaacagaaaaagtgtgaaactcttagctagcctagggatggagaagcagtaggtgattagtaattgcataggagggcgtcacggagggctgagccatggatggcggtggcgctggctccccaagctctgtcattgcccccagtgccctgttcacttagatgctcagtaaatgctccaggaaactgcagcacaaggaataatgaacttggagcggggaagagctggctttgtcccgggagagctcgggcaagaggcctcgcatgtctgtgcctcccttttcccctttgtgagacggggtatacccagtgcctcgtcactctgtggctgttgttatgattaggatcatttcctgctggaggcactgctgggggctccgtgagatggtgaatgacaagtggtggatacgtgggactgagattcctcccccgacactcaaaaccccatgggcggccgggcatagtggctcacacctgtaatctcagcactttgtgaggctgaggcaggcggatcacctgaggtcaggagtgcgagaccagcctggccaatatggtgaaaccccatctccactaaaaatacaaaaattagccgtgtgtggtggcgagcacctgtaatcccagctgcttgggaagctgaggcaggagaaccacttgaacccgggaggcggaggttgcagtgaagcgagatcgggccactgcactccatcctgggagataagagagaaactctgtctcaaaaacaaaaacaaacaaaccaaaaaaaccacgggagttttctggggtcgctgtgggtcaccccccagttgggcctggaggggatttggggacccggaagcaaaggattctgtgtgtcctgcctatctcccaggatcaggagctccagggaaaccctccctggagtcccttctttgtttgctccatgctgggtgatgccagggccccccaagaggtgtcagtcccaacctcagccacaagcaactcccagtcttgggagacagactgggacaggtaccccccaccctgtggagtcagggtgggctggaggaacaggagcagggagccggaaaggaggctggactccggacaggtgacaatcatgcaattgctgtcctctgtagggcaatgtgaaggctggggcgtggggacccgtccccccattagccagggtaacagagtggggaggggtcgttgacagagcggaggggtactccagggtggtgctcagtgaggcgagtgtagagttgagaagaaggaagttcccaggggtgggcaggaaacccatgtctgacctttgacctttgcagctacccggtggttcctgatcctgattccggacccttcccagcggcgtcgtcggcggctgctagtgggggaaggagggctgggggctgccacgggtgcccaaccagccatttctctgggttggccagacccacccagagccccccagagctgggcaggaggagaacatcctccgtaatgggggcaatgtagtctgagtgaacccagcattacagtttagagttctggagttgagttctgactgtgccacctaccagctttgtggccttggagaagtgactttccctccctgggcctcagttttctcctgtccgaagtggagatagccaggtgcagtggctcacacctgtaatcccagcagttagggaggcagaggtgggagaatcgttggagcccacaagttcaagaccctgttctaaaaaaaaaaaaacccaaaaaacaaaaacaaaacaaaaatcaagtgaagacaacatagccagttttttttgttttttttttttgttttttttttttttttttgagatggagtctggcactgttccccaggctggagtgcagtggcactatcttggctcaccacagcctctgcctcctgggttcaagggattctcctgcctcagcctcctgagtagctgggactacaggcacgcgccagcatgcctggctaattttttgtatttttagtagagacagggtttcaccaggctggtctcaaactcctgacctcgtgatccgcctgcgtcggcctcccaaagtgctcggattacaggcgtgagctacctcacctggccaacaacatagccagttttgaagtacttgacgtcatgcctggaacatactcagtcttaataaatgatggccttttttttttgagacagagtcttgctctattgctcaggatggagtgcagtggtgcgatctcggctcactgcaacctctgcctccagagttcaagcaattctcctgcctcagcctcccaagtagctgggattacagatgtgcagcactactgctcagctaatttttgtatttttagtagagacggggttccaccatgttgaccaggctggtcacaaactcctgacctcaggtgatccacctgccttggactcccaaagtgctgagattacagaatgaaccaccgcaccgggcaatgatggcattttttaagatgtgagggctggatcatgcctggcctctgatgtcaggctgaggaactcagacataggggaggggcagtattcccagctgccggtgccccaggcctgtgagagcactggggaaaggagagcatgatggggatgaagtgtgggtgaccagggtccagcagaggagctgaggctgggtgcagtgtctgggccaatgccagtagatgtgggtcttggtgtacacttaagatcttggctgttcttcattgtatatagaagatgttgcatctatgtatgtatgaatgtgataccagttgacaaggaaaaataaaggcaacctcaaactcccagaaaacaaaaagccccccggacctgatggtactgatgtgccacaattttgaacagttgtcaccatgtgagaagcagagttttaaatatacataccaatgttatttgtatcaagcccaaaaacaatatttggtgtccttttctaatttgatctcacacctttaatttgtaatgtttctgttttggatcatttgttatattagctgatttaactttgtaactttttgtttgtttgttttgaggcagagttttctcttgtcgtccaggctggcatgcaatggcatgatcttggctcactgcaacctccacctctgggttcaagtgattctcctgcctcagcctcctgagtagctgggattacaggtgcacaccaccatgcctagctaattttttttttttttttggtattttttagtacagatgggctttcgccatgttggccaggctggtgtcgaactcctgaccacaggtgatccacccacctcatcctcccaaattgctgggattacaggcgtgagccaccacgccaggcctgatttttttttttttttttttttttttttttttttttttttttttagcaaaaagggtaggctgggggtcgtggctcacacctgtaatcccagcactttgggaggtcgaggcgggtagatcacgaggtcaggagttcgagaccagcctggccaatatggtgaaaccccatctctactaaaaatacaaaaattagctagatatggtggcggatgccagtactcccagctacacgggaggctgaggcagaagaattgcttgaacctgggaggtggaggttgcagtgagcccagatcgtgccactgcactctagcctgggctacagagtgagactccatctcaaaaaaaaaaaaaaaaaaaaaggtaaagatagaccttcctctttttgcacagtattatgtctttgagattcattgactcctatggctggctgtttaggttttcaccagatacagtaccataaaattatgaatggacacttagattttttctgagttagtttttcaataaataaaagaagatttaaaatcaaatttcctggctgggtgcggtggctcacatctgtaatccaaagcactttggaaagccaaggcaggcggatcacttgagtccaggagtttgagaccagcctgggcaacatgttgaaatcccatctcttcaaaaaatacaaaaattagccgggtgtggtagtcccagctacttgggaggctgaggcagagaattgcttgaatccaggaggcacaggttgcagtgagccgagatcacaccactgcactccagcctgggtgacagagtgagacccggtctcaaaaaaaaaaaaaaaaaaaaaaagaaagaaagaaagaaagaaagaaagaaagaaaatcaaatttccagaaatgaatgaaattactgggtctcaaagtgggcacatttttacattttgatagttgtcaccaatttgtccttcaaagaggttgttttcattgacatctttgcctgcgatgtctgaaatctccaaacatggactttatgaaaatgttctgtttgtgtccttggccagaaaaatctggagggagaatgtgagtgcctgatcaagaatctacatgaagtcaaatgcatcagccctgatgtgagtgttgggttttttcctgaaaacaatttgtcatgttcacaggaaattttgcacatgaatcccttcaaattcccttggaggggcatcagaaaatcaggcttgctttttaaacccttttgtttttctaaacagaaaacaattgatttggtttcatttgtttgtttgagtggagaaggaaaaactgtcatgaggaagtcaactctgtgtcactccctgaaaactgacactgaagtcctcatggagacacgagttaaaaaaaaacaaaatcactcagaacttcaggaaggtccttgaggaagtgatatttctggtgaagaaggatttcagtgaagttcagaaaaccttccactattttgtttttttttttttgagacggagtgttgcgctgttgcccaggctggagtgcagtggcacgatcttggctcactgcaagctccgcctccttccgggttcatgccattctcctgcttcagcctctagagtagctggggactacaggctaattttttgtgcctttagtagagatggggtttcaccgtgttagccaggatggtctcgatctcctgacctcgtgatccacccacctcggcctcccaaagtgctaggattacaggcgtgagcccctgcgcctggcttttttttttctttttctttttttgttttttttgagacggagtctcgctctgtcgcccaggctggagtgcagtggcgccatttcggctcactgcaacctctgtctcccaggttagagcaattctggctcagcctcctaagtagatgggactacaggtacacactaccacccccggctaattgttatatttttaatagagactgggtttcaccatattggacagactggtcttgaactcctgacctcaagtgatcctcctaactcagcctcccaaaatgctgggattacaggcattagccactgcaccgggccaaccctccacttttatgtctgtgagtttggtttttggttaatcgaagtgaagttaagttttgtgcttttggaggtgacggaggcagcgaagagagtccctctgtggggtgggggaaacctgtgctctctgggactctgtgttccctgctgaaaaacagggacctaggctgggcgtggtggctcacgcctgtaatcccagcactttgggaggctgaggcaggcagatcacctgaggccaggagtttgagaccaccctgaccaacatggagaaaccccgtctctactaaaaatacaaaactagccaagtgtcctggcgcatgcctgtaatcccagcactggggaggctgaggcagaagaatcgcttaaacccgggaggtggaggttgcagtgagctgagactgcgccattgcactccagcctgggcaacaacagtgaaactcggtgtcataaataaataaataaataaaaagaaaaacagggacctacttccttgcctgtgactggagggctggaaaggtcaggttgcaactagcccatgtcccctcctgccaaggccactgtgggctttccatttttgtcccctacccctgtccctccagctatgggaggggaggtccagtgtggccacggatagggattacccaggatggtgccctggagacaggggtagacagacagagataaccagagacagaaagacacttaaagagatgaccagcagagggcgggtgctgttgctcacgcctgtaatcccagcactttgggaggccgatgcaggtgaatcacctgaggtcaggagttcgaaaccagcctggcccaacatggtgaaaccctgtctccactaaaaataaaaatattggccaggcgcagtggctcacacctgtaatcccagcacttggaggccgaggcgggcggatcatgaggtcaggagttcaagaccagcctggccaacatggcgaaaccccatctctactaaaaaaaatacaaaaattagctaggtgtggtggcacgtgcctgtaatcccttgggagtctacttgggaggctgaggcaggagaatcacttgaacccaggaggcggaggttgcagtgagccgagaccacgccactgcactccagcctggcgacagagcgagactccgtctcaaaaaaaaaaaaaaaaaaaattagcccagtgtagtggcacgtgcctgtaattccagctacttgggaaggtgaggcaggagaatcatttgaaccagggaggtggaggttgccgtgagccgagatcacgccactgcactccagcctggggaacagagcaagattccgtctcaaaaaaaaaaaaaaaaaaaaaaaaggctgggtgcggtggctcaggcccataatcccaacactttgggaggccaaggcaggtggatcacctgaggtcaggggttcaagaccagcctggccaacatggtgaaatcctgtctctactaaaaaaaaaaaaaaaaaaaaaaaaatttgctggctgtggttatgcgcacctgtaatcccagctactcaggaggctgaggcaggagaatcacttaaactgagggggcggaggttgcagtgagccaaaatcgcaccattgcactctagcctaggcaaaaagagcgaaactccatctcaaaaaaaaaagaaagaaagagagagatgatcaacagagaccaagagggatcattagacaggtggaggcagggagacagaacaaggacagctcagtggctggctctgtagggtgggaggcaggtctcactgagaagtgctgtttgcctctctgggcatccagggagcctcagtgcagaccaagttctcagcctaccctcctcaagtcacctcgaatactcaccgactcttgtcttatgacttccctggggttcaaagcctccagcctcaaattccccgcttcccaaaattctttgacactagttctgcctgtgcccctcctacttacacatctgccatggctccctatcaccctccatccccagaactgattttttttttttttggagacggagtctcgctctgtcgctcaggctggagtgcagtggcgcgatctcggctcactgcaacctctgcttcccgggttcaagcaattctcctgcctcagcctccggaatagctgggtttacagatgcccatgaccacacccagctatttttttgtatttttagtagagatggggtttcaccatgttggccgggctggtctcgaactcctgatcccaagtgatcagtgcgccttggcctcccaaagtgttgggattacaggagtgagccaccacggctggctcagaactgatgttcagtggtccctcgggtatggtcaagatggagccagcagtggaaataaatgcataatggtgacaatgacttagttcccatggacagccctgtgccctgccctttacacgggccagttcttggaccacacagcgccgtggtgagggggtcttgcgtccctggggtcctggctggggcgaggccagtctccaggcttccagctctggctgactccagaaggaggaaccgtttcctgctggcttctggattgacgccagggccgggggaggtggtctcagacccaccctgtccgactctcaaactctgggccctcaggaggctgcaactggatctgctggctggggcggcccctggtggccgttggcggaacacaacagctagatctccccttcccgcagcctcattttccccataggcagagcctccagatgagccccctctcaggtgaaggtcctgatcaggcacctacaaaccccaggtggatgggaggatcgtgagcaggactggctaaagggggtggtgtcagagttccaagagcttccaatcccctctctacaccggcctcttaggaattttttaaatttatttttatgtacttagtttttgagtaacaggtctcactctgtcacccagactggagtgcagtggctacgatctcagctcactgcaacctccacctccagggttcaagcgattctcctggcacagcctcccgtgtagctgggactacaggtgtgcaccaccacgcccggctaattgttatttgtatttacttatttatttttttgaaatggagtctcgctctgttgcccaggctggagtgcagtggtgcaatctgggctcactacaacctctgcctcccagattcaagcgattctcctgcctcagcctcccaagtagctgggattacagacgcccaccacctcgccctgctaatttttgtatttttagtagagatggggtttcaccatgttggccaggctggtcttgaactcttgacctcagatgatccacctgcctcggactcccaaagtgctgggattacaggtgtgagccaccgtgcccagcctattcatttagtttttgagacagggtctcactctgtcgcccaggctggagtgcaatggagtgatcttggcttactgcaacctctacccccagggttcaagcgattctcctgcctcagcctcccaagtagctgggactacaggtgcgcaccaccacgcctggctaatttttaaactttttgtaaagatggtggtctccttacattgctcaggctgttctccaactcctgggctcaagtgatcctcctgcttcagcctcccaatgtgctgggattatagacacgagccaccaccacactcagcccagacatttttaaaaacaatttttaatttttaatttgtaataagtgacacatgtgcatggtttttaaaaatgcaatttttacaaaaggtacatagagaaatgtgcaagtatgtcccccaccgattcccagacccctggttcgctccccagaggtggaggctgtgaccagcatctccttcagagatatttggataaaagtcccctccccaagccctacacacacacacacacacaaaaacgggggccgggcacagcggctcaggcctgtaatcccagcactttgggaggccaaggagggtggatcacccgaggttagcaattcgagaccagcctggccaacatggtgaaaccccgtctttactaaaaaacacaaaaaactagctgagtctggtgatgggcgcctgtaattccagttactcgaggctgaggcaagagaatcgtttgaacccgagaggcggaggttgcagtgagctgagactgcgccattgcactccagcctgggcaacaaaagcaagactctatctcaaaaagaaaaaaaaagaaagaaagaaagaaagtacacaacttatcaatctcctgcttttcacattaacatatcttagagaagatctgctttggctgtttaaatggtggttgcatagcgttccactgtggatggacagacactttttctttttctgtctttcttttctatttatttttattttttttgagacagagtctcactctgtcacccaggctggagtgcagtggtgcgatctcagatcactgcaagctccgcctcccaggttcatgccattctcccgcctcagcctcccaagtagctgggactacagatgcccaccaccatgcccggctaattttttgtatttttaatagagaaagggtttcaccgtgttagccaggatggtctcgatctcctgacctcgtgatccgcccgcctcggcctcccaaagtgctgggattacaggcgtgagccacccccgggctctttttttccttttttttttttttttttttttttgagacaggatctcactcagtcacctaggctggagtgcagtggcatgatcatggctcactgcagcttccacctcctgggcttaagtgatcttcctgcttcagcctcccaagtagctgggaccacaggtgcatgccaccaagcctggctactttcttctctttctttcttttcttttttgtctttcttttttctttctttctcttctttcttttcttgaaggggttttgctccagtcaccctagcacgatcttggctcactgcagcctctgcctcccaggctcaagtgatcctcccacctcagtctccgaagtagatgggaccacaggtgcatgccaccatgcccagctaatattttgtatttttggtagagaatgggtttcaccatgttgcccaggctggtctcaaacacctgagctcaagtgatccacccgcctcagcctcccaaagaattttgaaacaattatttgtagagacagggtctccctatgttgcccagactggtcttgaacttcagggctcaagagatcctcccgccttagcctcccaaagtattgggcttacaggcatgaaccactgtgcccagcatgattttcttaataatttttttatagctttaatttttcatgtttaatttttgagaccgggtcttgctctgtcactcagaggactgaagtgcagtggtgtgatcatggctcactgcaaacttgacgtcctgggctcaagtgatcctcccgcctcagcctcccaagtagctggggctacagatgcatgtcaccatgctcagctaattattgatattatttgtagagacaggttcttgctatggtgcccaggctggtcttgaactcctgggctcaagtgatcttcttgctgtggcctcccaaaatgttgggattacaggcgtgagccaccacacctggccagctttgagtttggaggagtcaaagttatgtgtgaattttcaactgcatggagaactggtgcccataacctttgtgttgttaaggagttggagattaatccaccaaattttctgtaagtctgaagttatgccaaatataaaggttaaatttagataacaagctaaaaatgtttaaaggttagaaaaacaagaaaacccactaatacattcatgtgaaattgagcaatataaaattgtccatatttcaatgatttttgacccatataaacagctctttcttgtgattcaacctacagattctcttccttttagttgtagcttttatttttcttgtgtaattgcattggcttgtactcccagaaaaaaaactacttgacagtggacgtcctcaccttggcactgattttgatgtgttttttcccccacaatttatacatttcctcatttgatctattagtatagcaattaacagacttggcaatattgaaccattgctctgtctcaggcataagtcacctttgttgcagtgtaggttaaaaacatgggctgggagcggtggctcacacctgtaatcccagcactttgggaggccgggtgggcggatcacctaagctcaggagttcgagaccagcctggccaacatggtgtaaccccgtctctactaaaaatacaaaaatcagctgggcgtagtggtgggggcctgtaatcccagctacctgggaggctgaggcaggagaattgcttgaacctgggaggtgaaggttgcagtgagcccaaattgtgccactgcactccagcctgggcgacaacagcaaaactccatctcaaaaccaaaccaaaacaaacatgttacttggttctttttgtttaaattccatctgggagttttgtacccttctcacagggttagggatttgcggttttcctattgtgccacctttgtcagcttttgttgtcaaatcagctccctatcatgagtccaatcacccattttacagatagggtaaactgaaacccaaagagggaaagtgaccctttccggtttttcctgagccagggctagacctccagtcctcatatctgtgggatgacggcaacattgttgttagaggggacttcaaatcccagctaagcactagctcactgcatgatcacttgggcctcagtttccctgtctgtagaataagcactttacatggtgggggagagagggctgaggcacctttctgtgcagtttccgttcaggacgtctccagggtctaaagctgagtgtcgcatccagcgtgggggtgcctctatacacgtccccgcagaccccccccccatatgtgtcctccaggccgacgcccccttccggcagggggccgactcaccctcgtgcgcgccgcgccggccgccggcagcccccggagggtccggagcgagagcgcgagcgagggctgggccggggtcgggaccccgagcggggacgcggccggggcactctgcgctgtgggctcatctcggcttccaggacgttactgccgggaagggggaagggggctgtcagcctctggacccctgtccccagacatcgccagccctcatccgccagagcgtccctttgctgggaactccatccccagagatccccatctcccagggtttcccgctccccaggatccggcatccgttctcgacccccagccattcccgggacgcctccctagagactcccagctacatccccagaagctctgtccccctaccaccagcctctccctcgatactcccttttccttgctcccttctcttccgttccccgtccctctcggggctcccaccgacgctggatcctggggacctaagtttctagaatgcccgccccagcctggaatcccaagagagtccactcccttctccatccttaggttccaattccaggatccccctattaaatcaacaatgccccccccccaccacaattccacgcccaaagtaatgattggccgaaagaatgcagccctgcgcaagcattggtcgcgccctccccgtccatccgaccccgccctcgggccagcccctcactcacaggcgttcgcgcagcgccgcctcccgggccgcacaggcttcgccctcggcctccgccacgcctgcgcgccgcagagcctcgtccagccgccgcgtagactccgtggccgccgcctcccagcgcgccagggcctctgggggcgcagggagccgggtcaggctggagactcccgcgcccacccgccccacgcacgccggaatccaagttgatagtctgcatgccgtttgcacgctttcctttatttgaattaaattagtgtgtaccattgcatggcttccacgtgccatttgcatagcttttcataggtttgcattgctttcgtgagtcgtttacaaggagtttgcatgttttgtggcatttgccttgtttttgtgacatttgcatggcctctgcatgttgtttgcattcttttcataagtttttgcgtttatatccgtgttatttgcattacgtttgcaactgtgcttgtttggataactaggattcacctaggctcctcccacttctatccctgcccactcccttacaccccaacgcacctgtcagcgccccgttctcggcccccatctgggtcccctgtgccttggcttcgtccatctcaatcttcagtgtcgttagttgggtctgaagccggctctgaggagtggaggggaagtgggagggggtgtaggcagaggagaggaggagtgattcggcctggcccttttggggacagtgagaagccacctgcgaccctgtgtcctgagctttgtgtggaatgtcctttggggccttgtagttgtaaaatacagaagtggcttctgaagcctggggcaccgagtggtgacagctgcctgcctggagggagatctctgcccaggtccaacgccaccaaccctaagccaccagaaagtggagagtgctgagctctgcggtcagattcaagttccactttcagctccatctgggactagctgatgggatttcaaaccaacaaagttagccgggcgtcgtggctcacgcctgtaatctcagcactttgggagaccgaggcaggcggatcacttgaggccaggagttcgagactagcctggccaacatggtgaaaacccatctctacttaaaaaaaaaaaaaaaatagcagtgtgtggtggtgggcgcctgtaatcccagctcctcaggaggctgagacaggagaatcgcttgaacctgggaggtggaggttgcagtgagctattgtgccactgcactccagcctggacaaaagagcatgactccgtctcagaacaaacaaacccagcaacaacaaaaaccaacacagggcaatttgatggttgacaatgattgaatttttggggtatgtgtcggttgcctgtgtaggacattctgcaaaacgactggttcggcttcctcagtgcgtcttacagcaagggggcagagccagaacctgtacttggagtaggatcctcttaacctcgactgccccagtcccttctcttggtccagggggcagaaaaggggtaggggtttatttggatttatttatttattttgagatggggtcttgctctgtcgcccaggcgggagtgcagtggtgggatctcagctcactgcaacctccgcctgggattacaagcatgcgccatcacacctggctaatttttgtatttttagtagagacgggttttcaccacattggccaggctggtctcgaactcttgacctcaactgatacactcgccctggcttccaaaagtgctaggattacaggcgtgagccactgcgcccggccccattttgatttttaatattcagatgctgcactacctcggctgggctgggaggttggggtggaatggggggtgtgcacagaggtatacagtagtcactccataaatggaaatggctgggattttaaggacagttcttttggcaggctcagggctggaaaaggttaagaaaaagtctgaagggttagtcagaggaaaaggaggacccagcaggtacctcccccaagaggccaactttagcctcctaattacaggtgacatgtatgtccctctctcaaaatagggctgctggaaactggctggagtggggctgagttggcacatggaggagggcctccagtggtctggcgtttctccagacaccatttatctggcaaatagcaaaggacagtgagacttttttttttttttttttttttttttttttcagatggagtctcgctgtgtcacccaggctggagtgcagtggcgcggtctcagctcactgcaacctccaccttccgggttcaagcgattctcccgcgttagcctcctgaggagctgggattacaggcgttcaccatcacgccaggctaatttttgtatttttagtagagacagggtttcaccatattggccaggctggtctcgaactcctgacctcaggtgatccacctttctgatcagaaggtagactccatggtgagctgacatctaagggttggaaggcattagggcgctattctcaataccctctcaattcgaggaactggggaaaccgaggcacagggagggaaccctggagttgtgtgggcaggccgtctcttatctcaacattctggattcccgagctccccctctacccggcccacctacctggcggccttcacaggcctttaatgccttctccaactcgtgccggatactttccgcctggtccagctgcctggctagggcctcctcccgctcggcagcctctgccagccggcgccgcaggtcgtcgaccccaggcggcgggtccccgggcggcgccgtggcattggcccctggctccgggcagcgaggtccccgagcagccgaggcggccagattccaggctaccagggccccgccggctgctgccgcagccaggaacacggccaccccgcacagggcgagcacccgccaggcacgcccgggctccggccccggctcggccatgccgcggtccacagctctggccccagacggccacgaatatttaattggcaccttggggcgccagggacacccacggttccgcccagcctggccgtggcttcccaggccgttgggaggggttggaccccctccaggggctggtccatcccgtcgagcccaagaaaggactaggggttctgggttcctgcatcccacgtgctgccctctgtgcctcaatttccccctttgtgaaatggggagagtattaactcctgcttggtagggcttggtaggaatcaagctggcacatctgtaggaagcgccaaagaccgcatctgcaaacgaagtgcttggctatcatttggggatatgtcgtttccaatattttttaatcttaattttgtgtgtttgtgtcgcccaagctggagtgcaatggcacaatcttggctcactgaaacctccgtctctggttgaagcgattctcctgcctcagcctcctgagtagctgggattacaggcgactgccatcacgcccagctaatttttatatttttagtagacacggggtttcaccatgttggccaggctggtctcgaactcctgacctcaaatgatctgcccacctcggcttcccaaagtgctgagattacaggcgtgagcccccgcgcccggctaattttaattttttttgtttgattgtttttttgagacagggtctcgctatgttgcccaggctggtcttgaactcctgggctcaagcgatcctcccgccttggtctcccaaagtgctgggattaaaggcgtgagccaccgcatccggcctgtggttcccattctgttgacggggtaaccgcattgggagatgggaggatactccactgacttacggttggcagagtttaggctgccacgccggctgtgaagaggaccggagggtagacaacagggtggaccggccccgtcttcccgcctgctcgccactgggcagccagagggcgatcttacaacgtgattacaattgggctctggctccccttccctcttagaatacaacccgttctcccctccccttccttcctcctactctccctcctccccctcctccctcctcttcctgtttctccttctctatctccccctgccccttctctccctccttacaccttcaaggacctgatcacacctttaaggtcattttcttttcactccttcctgtagcctccccaaggttcttccaccaagtgcattcccatcgcagggcctttacaccttctcctcctctgcctggctaattgctgctctgctaacaggtcccctcctacagaaagtccccctcttcaacactacctccttttgatcagctcctagggccctaacattaaaaaggtaatggcaggccgggcgcaatgggtcacgtctgtaatcccagcactttgggatgccgaggcgggtggatcacctgaagtcaggagttcgagaccagcctggccaacatgatgaaacctcatctcttttaaaaacacaaaaattagtcgggtgtggtggcgggcgcctgtaatcccagctacctgggaggctgaggcaggagaatgggttcaacccaggagggggaggttgcagtgagctgaaatcatgccattgcactccagcctgggcgacaagagcaagactctgtcttaaaaaaaaaaaaaattagccaggtgtggtggctggcgcctttaatcccagctactcaggagggtgaggcaggataatctcttgaactcgggaggtggaggttgcagtgagcagagatcgtgccactgcactccagcctgggtgacagagtgagactctgtctcaaaaaaaaaaaaaagtaattatatatttatgcgtgtgactgattctcccccccacccccgcctttcccatcaaactgggtgatcttccccttcaccctctgaaggttccttgaaaaatcaactcacaaaaggaagattaataggagaaatgaggcagaggtgggaggatcactttagcccgggagtttcagaccagcctgggtaacacggtgagaccccatcgctacaaaaaaaaaaaaaaaaaatgagcctgatgtggtggtgtgcacctgtagtcctagctactcaggaggctgaggcagaagtatcgcctgagtccaggaaatggaggctgcagtgagccgagatcgcaccactgcactccagcctgggcaacagagtgagaccatgtctcaaaaaacaaaaaaaagtctattcaggtatgttgatagactttagtctttctgcctgtgatatgagttcagttaatgaaaactcaaagaatcagaagtaattgttttcttttttggtgggtccagaatttaggcgtgtaaaaaataaaataaaattttaggaccttccagatttattatgtcaaggggtaatagttaagccctggaaactgaatcaacctttctttcttttcttgtattcattcattcattctttctttctttctttcttttttttttttttttttgagatggagtcttgctctgtcgcccaggctggaatgcaatgttggctcactgcaacctctgcctcctgggttcaagcaattctcctgcctcagcctcctgagtagctgggattgcaggcacctgccaccactcctagctaattttttttttttttgagatggcgtcttgctctgttgccaaggctggagtgcaatgtcacgatctcagcccactgcaacctctgccttccaggttcaagagattctcctgcctcagcctcccaagtagctgggattacaggcacctgccaacacacctagctaacttttatatttttagtagagatgggatttcactatgttggccaggctgtctcgaactcatggccccaagtgatctgcccacctcggcctcccaaagtgctgggattacaggggtgagccaccacgcctggcctctttattttttcttttcttttttttttgagaccaggtctcactctgtcacccaggctggagtacagtggtgccatcacggctcactgcagccttgacctcctgggctcaagcgatgcccccacctgggcctccagcgatgccccaacttgggcctccctgaatgctgggattaccaccactgtgagcaccgagccaccccattcccaacccctggcctttcttgtgtggagatatcccacattaactagacttcctagtcttcattcaagcatagactaaatgttgttggagatagagacccttgtgactgtcacctctttacaacagaatgtgtaagcaacccccttaggacatagtcaatagtagccaatctaatctcctatctgtattctagcctttgcatgggaaatgtatttctgttcagcacctctgtttgtggctttataaaggatccaggccaggcgagctggctcatgcctgtaatcccagcactttgggaggccgaggcgggcgaatcacgaggccaggagttcgaggccagcctgacccacatgtcgaaaccctgtctctaccaaaaatacaaaaattagccgggcgtgatggcgggcacctgtaatcccagctactcgggagactgagacggagaatcgcttgaacccgggaggcagaggttgcagcgagtcgagatcatgccattgcactccagcctgggtgacaagagcaagactccatctcaaacaaacaaacaaacaaacaatccacacttttccctgaatgagaggcactcatcctcattctttggtgtccctgtggccctggatagactctgccctcacactttgccctggaaaaaactcttttaaccaggcttggcatggtggctcacatctgtaacccaagcactttgggagactgaggtgggaggatcacttgagcccaggagtttgagatcagcctgggcaaaatggtgagaccccatctctacaaaatataaaaaaaattagggccgggcatggtggctcatgcctgtaatcccagaactttgggaggccgaggcaggtggatcacctgaggtcaggagtttgtgaccagcctggccaacgggtgaaaccccatcttaactaaaaatacaaaaattggccagcgcaatggctcatgcctgtaatcccagcactttgggaggccaaggagggtggatcacgacatcaagagtttgagaccagcctggcaaacatggtgaaaccccatctctactaaaaatacaaaaattagctgtgtgtggtggcgggtatctgtagtcccagctactcgggaggctgagctgagatcgtgccactgcacaccagcctgggcgacaaagcgagactctgtctcaaaaagaaaaaaaaaatttagccaggcatggtggtgggtatctgtaatcccagctactcgggaggctgaggcaagagaattgcttgaacccaagaaggggaggttgcagtgagccgagatcatgccattgcactctaacctgggtgacaagagtgaaactctgtctaaaaaaaaaaaaaaagaaaaagaaatgagctgtgtctggacgtgtggacgtggctcactcacgcttgtaatcctggcactttgggaggccaaggcaggaggattacttaaggccaagcattcaagatcaacctggccaacatagtgagatcctgtctttattatttaaaaaaaaaaaaaatttgctgggcatggtggtgcatacctgtggtcccagctactcaagaggctgaggtgtgaggattgctggagcccaggggattgaggctgcagtgatccaaggtcgcaccactgcacttaagcctgggtgacagagagaggccctgtctcaaaaaaaaaaaaagaaagaaatcagagctcagagaggtcgagtcccagagcagggacactcagcagtggctggtcactgccaaattcccactggggactgcagaaccccacagccgtcagcttctcaacccctgggtgggtcacagccttggagtcaggtctctcaggaaaaggacaaaatagggagggaagatgggacattttaggaagtagggaaatttacacccaggccattgtgtggggggattgggagttgaatccacaatattgggctaatcttatcagcaaaatacagcccaggcaggatgggggtgggggttgtggggggagagtgggggagggagtgtgagtaggggtgggggtgggtggagcagcagcatagtctggggacctttccatggcccaagtcgggagtggtgagtggaggaggtcacgtggggagcgtttgtttcctgggcaaaaggaaatccacagaatgtggagggttaattgcccaacgagctttgaaaccctgaacaaggccaggcatggtggctcacgcctgtaatcccagcactttgggaggctgaggcgggcggatcacgaggtcaggagatcaagaccatcctggctaacacggtgacaccccgtctctactaaaaatacaaaaaaaattagcccagcgtggtggtgggcgcctgtagtcccagctacttgggaggctgaggcaggagaatcacttgaatccaggaggtggaggttgcaatgagctgagatcgcaccattgcactccagcctgggcaacagagcaagactccatctcaaaaaacaaacaaaccaaccacaaaaaaaacaaaaacccctgaaaaagtccagtaattaccctaggcctcaccggggctgttggtgaggatgaaatagcttagtagttgcaaagcggctttggcttttttgcaagccagggccacagaagtgaaggcccaccctgctcccggggacacttagcaacatatagagactttttttttcttttgagacagagtctggctctgttgcccaggctggagttgcatcatcttggctcactgcagccttgacatcccaggctcaagcgatcctcctgcctcagcctcccaagtagctgcgactacaggcgtgtgccaccatgcccagctaattattaaattttttgtagagatggaggtctccctatgttgcccaggctggtcttgacctcctgggctgaagcaatcctcccccttcgacctcccaaagtgctgggattacaggcatgagccaccatgcccagcctggaaacatttttaattgtcacaacttgggagggtgttacttgcatttatgggtgggggccagggatgccgtttaatatcctacaatgcagctgggcgccgtgtctcatgtctgtaattccagcactttgggaggccgaggcgggtggatttcttcaggtcaggagttcaagaccagcctgaacaacatggtgaaacaccgtttctactaaaaatacaaaaattagccggacatgatggcgggtgcctgtaatcccagctactcgggaggctgaggcaggataatcacttgaacccgggagacggagtttgcagtgagctgaaatcgcaccactgcactccagcctgggagacagagtgagactccatctcaaaaaaacaaacaaaaaaaacccaaaacaaaaaacaaaatcctacaatgcacaggatggtccccacccagagaaccatccagcccaaaccaccaatgctgctgaggctgagaccctgccctagaccttgggagtgaggaacgggtgctccaggcagcaggcagagcttgggcaaaggccttgaggcaaaaaggaacttgggatcagtaaaggtggaggtggtgagcaaggggaagtgagggggcaagagggccagggggtctgtggcaggggaggtatttggggacccttccctgggacagcagtaggaaccatggaagtggaggcctggttttatttatttatttatttttgagacagactcttgctctgtcgcccaggctagagtgcagtagcgtgatctcagctcactgcaacctccacctcctgggttcaagcgattttcctgcctcagcctcctgtgtagctgggactataggcacgacccaccaccccccgctaattttttttattttgagacagagtctcgctctattgcccaggcaggagtgcagtggcgggatctcggctcactgcaacatccgcctctcgggttcaagcgattctcgtgcctcagcctcctgagtaactgggactacaggtgcatgccaccacgccaggctaattttttgtatttttagtagagacagggtttcaccgtgttcgccaggatggtctggatctcttgaccttgtgatccaacaaccttggcctcccaaagtgctgggattacaggcatgaaccaccacgcccagccatttttttgtatttttagtagagatggggttcaccatgttggccaggttggtcttgaactgagctcaagtgatccacctgcctcggcctcccaaagttctgggattacaggcgtgagccactgtgcctggccagagggttttttttttttttaaatcccactgaccgtctgggctggggactgtgggaccttaggatagtacagaaatctgggacaagggactcctggctccattaccacaaacaggagttggagttgcagagacaatggccgggattccgggagaacttggaggaagtaagataacagagaaggaagggactatggcatctttgaggatcgaataaggtaggtgaagggtccgtcgggattgcagccctcaattgtggagaagcagagagactctctgggggaggggttcccagagctgggtactgcagaatgaataagagtttggggaatcgggccaggtgtgatggctcatgcctgtaatcccagcactttaggagcccaaggtgggtagatcccttgaggtcaggagtttgaggccagcctggccaacatgatgaaacccctgtctccactaaaaatacaaaaattagccaggtgtggtggtgtagtactgtaatcccagctactcgggaggctgaggcaggagaatcacttgaacctggaaggcagaagttgcagtgagccaagatcgtgccactctactccagcctgggcgacagagcaaaactctgtctcaaaaaaaaaaaaaaaaaagagccgggggtggtggctcatgcctgtaatcccagcactttgggaggccaaggcaggcagatcacctggggtcgagagttcgagactagcctgaccaacatggagaaaccccgtctttactaaaaatacaaaattagccgggcatggtggcgcaagcctgtagtcccagctacttgggaggctgaggcaggagaatcgcttgaacccgggaggcggaggttgcggtgagccgagactgcgccatcgcactccagcctgggaaacaagagcgaaactccgtctcaaaaaaaaaaaaaaaaaaaaaaaaaagagagagagagagagaatctgggggatgaagcagggggaaacattctgacaatgcatggcctgtgtgtgtgtacagatcccagtttaaatcccagcccagcattttctgcaggcgggaagggaagcaagacaaggttactctcagttacagcctcagtttcctcactggatccccaggaatcaggagaggctctagggaggagatgagaatacaacacctgggaaacggtgagccctgatgagggtgcatagttcttatgttgatcccagcagagacaagggctgggaagaactggggtggtgcctccccgaactccgtgggctcctgaaaacgtcctggagcagggaagggaggtgtcatcgtcaacggggtgtccactctcacctgcaggggcggccccaacgcttgggtactaaaacgatgatactccaggaactcgagagtcaggtgtgctctccctcaaaggaagtgtttattttttggagctcaaagaccccagaaaaaagcaaccccccccgcaaaaaaaacccataacaacaggcagcacatgccccccacaccgcaccccatgcccaatctcagggtgggagacaagaggggggactcattgtccggagggaggctctggagggagacagccctgggtcaacccgactgtgtccccacacccaggacttccccatggcccctccagacctgctccagaggcccttctccggctaccccgtgctctccccgctaaccgtgttgccccatgacccgctcagaactgatgagatcaagggaatgttcaagcgaaaagccgagcaggacggaccttccaagatgtgcctaaaggaccagaagagggactcagggcagactggaggcagcagacactggccccgctccaagcccggccccaagccccgcccccatcgctagacccgccccacccatccataagcccctcccctccatcgatagacccgcccccattgatagccccgccccatacagctatcagcccgtccccgatccagggcatccttctcactggattctccctccttccccaaggcccctcacctctgcgcccagtcccttcccctgcagcctctctctctagacttcggagcctctgcttccccgccccgcttccccagctttcttctccctcccggggccgccccctcctcactgaccagcttcctgggatctcactgcagcagagcgctgaggcccagcagcacaatcagcagctggggcgccgcagcggagctggagtcctgggagctggggtagtacttcttgtccgcgattctcacgcttaagacctggttttctcttctgcggtacagatggcaaatcaggcatctgctcgtcctggctcctgccgccctccctgtaagcccaccgcccccgggagttccccccgcaccgccccaatccaagtcaccggggagggaatggacagcggccacccatggctctgtgaccctaggggctaagttatccttttgtgggactcaaactttatcccttggggcaatggggattttgggagcaaaggagatcctgggtcttgggctagggatgtgggggtgagaggaatgtggcaggtggagggtagcgggggaaggctatctctgacctcagtcgctccacctctgcagacgcgtcctgaagcttatggtttaatgtagtgatctctcctggtagggtgggaggacagaaacagggggcgggtcagcatgtggccatgctggggccctgctccactctgggacagaacctcccccttaccccaacctccagccctggtctccctgcccccaccccctcttccatacctgactcacccctccccggccctctcccttctccctttctcaccctcaagctcctccactttcttttgtccttgggccttctctgcatccagggaagccattagggccatctaagaagagttagaatctggggttttggcctggggagtttggctgctgcccctgggacctgggcctcctccctaggtcctggggacagaggggcttaaatgcaaacccctttcaggttttcttccaaccctctctgcaccatggtctccaaccttaaagaacagccacaaccacacactctcccagggccacccataagcatgtgggtcctcaaaatgggagttttgaggccaccccacgtggaaacttggaggctatcgataaccaaagtttagtggacatttccagattgcctgagcaatggcccaagaaaagttagagggccctaccaaatccagaatgcagtgggatttccccgcccaagtgacatgcccagcgagagtttcaagatcccccatatcaggacccaggtgaatatttcagtttcttagggatgaagtgaaaatttcaaaagccccctttttcagggtctggtgaggtcccccttcaaccctgaatagggatttctactcccccaggactggtgcccacgaggagtttcaaggcccccgacaccagtgccctggaaagaatttataaattcacctaagtcccagggggatactgaggtccccgatttgggggatctggagagttttaacaccctgcccctacaccagtgccctggactgggttaggggcccacaaaccctggtaggggaacctaggtcccttgatgtgggggcccaggagcagtttcaggacctcccctgcatctccctggagacccaccctgggtcagatttctggggagagattcttgtccctcccaccgcctagtactaggccatccaaaggagttgaggagcttaccacagtgtggttgcaggtggcggcctgggcctccacatcctgaaagcccttctgggcctcggtcagctcttgttgcaggagatgggtgacattgcgacactccatcactgcccgaaggccgtcccggcaggcctcgctgttggccttgatggtgaagataatcaagggcacccccagaatcacgatgatcaggagcaccagaattcctatccccagcagaagcttacagcgcttatccccgtcttccatgggcactctgcaatagtcatacgaagtagatgccatccagatctcccctttagagtctggcctggagttaggggagggtgctggaatcttctacgggccacccctttattagcataggaaacgtcctgaccaatagcaagttccaggaagtgctctgaccagcagctcttgcatgaggcacctacaggcagaggattaattaggttttcagtttcagtttcccagaaaggaggtgggcttttttttcaccctgctttaaaagcccttgggcccttcccagctgggtgccagccaactgtggctgcctgggacactccatcttaagtccctgtgcctctgctgtgtgttactgagtgcctaggccgtgccagcctgtattcatctgtactatgacctgaagaggcagaggccatcactgttggtccggtctccacctggggaaactgaggttgcacagttgcgtggtggagtgagggcagggcctgggtctgggggcggggcctgggtctgaccccagggactggtttttgtgttcaggtgtctctgtggtgacgagcagggcttcatccagtgcctctgtccccaccgaggggactatgggagacatggagggtgtgtgagcaacaggtgagactggagccagctgaaaactgggagaccgacccagccaacaaacaatgtcggtctctgtcttggcacctgcaggaaacaagctcctacttccagaaaaagtgctcctgggactccaggataccaggtaaactctctgagcctgtttcttcatctgcaaaggggaataacagggccagcctcagacactgtccatgtggccaagagagccagggcttcctacaggaaatcaggcccattatcggcacccaactgctgggcatgaccgctgaaaggggactgcatgtttttcttgtggcttcttcagccacatcctgaccacagcccagattctgttaggtctgccatttccatgtttttttttcttttcagcagggccagacagtaggcgaggtcaagtccagagcccaggcctcccagaaggcctggggaactccccccaggccctgactccaacatccctcagaaggaccccattaaagccacttagagccaggcatggtggtacatgcctgtggtcccaggctgaggctgggaggctgaggcaggaggatcactcgagcccaggagtttgaggctgcagcgagctatgattgtgccacggcactcaagcctgggtgatagagtgggatcccatctcttaaaccaataaacaaaaaaatcacttagaaccaagaaccaattaacaagctgtgggagatgatcttgctgaaaattctgagggtgaacttgtcccaggaggagggacctaccagcctggccaggactccaggtgcaaagacacgacctttgcctgacttatttgactaagctgacttatttgagcagcactgttctggcctgctaactttagggttagtttgggaccaggtcggaaatcacaattgcatgaattgcacattggaggccagggtggtgcacctctgggcaaatgaatttcctctcttagcattgatttccccagctgtaaaatgtggataataatagattgatgtcctctctaaattttgcagctgtaaacagtcccagccctgcaaaccgaaagtttgttgctcttccctttaaaattactgtagggaccagccccacagggtcagtgggtctctccctgtgtgcggcgacgagagagtgtagaaataaagacacaagacgaagagataaaagaaaagacagctgggcccgggggaccactaccagcaatgcgcggagactggtagtggccccgaatgtctggctgtgctgttatttattggatacaaagcaaaaggggcagggtaaagagtgtgagtcatctccaatgataggtaaggtcacgtgggtcacgtgtccactggacagggggcccttccctgcctggcagccgaggcagagagagagagaggggacagacagaaagacagcttatgccattatttctgcatatcagagacttttagtactttcactaaatgactactgctatctagaaggcagagccaggtgtacaggatggaacatgaaggcggactaggagcgtgaccactgaagcacagcatcacagggagacggttaggctgccagataaccgcgggcgagcctgactgatgtcaggccctccacaagaggtggaggagcagagtcttctccaaactcccccagggaaaaggagcctccctttcccggtctgctaagtagtgggtgttgttccttgacacttttcgctaccgctagaccactgtccgctcgggcaacgggcgtcttcccagacgctggcgtcaccgctagaccaaggagcccttctgctggccctgtccgggcataacagaaggcttgcactcttgtcttctggtcacacctcactatgtcccctcagctcctatctctgtatggcctggtttttcctaggttatgattgtagaccgaggattattatactattgggataaagagtaattactacaaactaatgattaatgatattcatatatctctaagatctatatttggtataactattcttgttttatattttattatactggaacagctcgtgtcctcagtctcttgccttggcacctgggtggcttgccgcccacaattacaaatggtgggatgggtgcagtggctcatgcctgcaatcctagtactttgggaggctgagatgggaagattgcttgaggccagtagttcgagaccagcctggtcaacatagagagatcctatccctatttaaaaataaatatatatatatattttaagtacatatatttattttattttgttttaattaattaattaattaattaattttttttgagatggagtctcgctcttgttgcccaggctggagtgcagtggcacgatcttggctcactgcaacctctgcctccggagttcaagcgattcccctgcctcagcctcctgagtagctgggattacaggcgcccaccgccatgcctggcttatttttgtacttttagtagagacagggttttgccatgttgaccaggctggtcttgaactcctgacctcaggtgatctgtctgactcagcctcccaaagtgctgggattacaggcgtgagccactgcacctggcctatattttattttatatttttaaatatataatgtatttttatatattggttggtgcaaaagtaattgcggtttctgccattacttttttttttttttttttgagagggaatctctctctgtcgcccaggctggagtgcagtggtacgatctcgatcactacaacctctgcctcctgggttgaagcgattctcctgcctcagcctcctgagtagctgggactacagatgcctgccaccatgcctggctactttttgcatttttagtagagatggggtttcgccatgttggccaggctggtctcaaacttctgacctcaggtgatccacccaacttggactcaccaagtactgggattacaagcgtgagccaccgtgcccggcctatattttattttatatttttaaatatattctccctctgtcacccaggctggagtgcagtggtgtaatctcggctcactgcaacctctgcctcctgggttgaagtgattcttctgcctcagcctcctgagtagctgggactacagatgcctgccaccatgcccagctactttttgtatttttaggagagacggggtttcgacatgttggccaggctggtctcgaactcccgacctcaagggatccacccgacttggcctcccaaagtgctgggattacaggcatgagccaccgctcccagcctctgccattacttttttttttttttttttttttttgagatggaatttcactcttgttacccagggtggagtgcaatgatgcaatcttagctcaccacaacctctgcctcctgggttcaaacaattctcctgcctcagcctccctagtagctgggattacaggcatgcgccaccatgcccggctaattttgtatttttagtagagaggtttaggtttctccatgttggccaggctggtctcaaactcccgacctcaggtgatctgcccgcctcggcctcccaaattgctggggttacaggcttgagccaccgcacccagcctttttttgtttttttctttgagatggagtctcggtctgtctctcaggctggggtgcattggcacgatctcgtctcactgcaacctctgacctccgcctcctgggttcaagcaatcctgctgcctcagtctcctgagtagctgggattacaggtacccgccaccacgcccagctaatttttgtatttttagtagagacggggtttcaccatgttacccaggctggtctcgaactcctgacctcatgatccgtccatctcggcctcccaaagtactgcgattacagccatgagccaccacgcccggccttccattacttttaatggcattaattaattatgcttactaaaagttatggcagaaaccacaattactttcgcaataaaattagaaatggaaactgttatgctaccattctttttctttttttattttcttttgagacagaatcttgtcctgttgcccaggctggagcgcagtggtgcaatcatagctcactgcagccttgacctcctgggctcaagcaatcctctcacctcagcctctggcgtagctgggactatatgtgtgcaccaccacgcccagctaattttttattttttgtagagatgggggtctcagtatgtttcccaggctggtctcaaactcctaggctccaaagatcctcctgcctcagcccccgcaaagtgttggaattacaggagtaagccactgcacccagccgctagcattcttttggttttagcttcatatatatatatatatatatatatatatatatacacacacacatatatatatacacacacatatatatacatatatatacatatatatatacacacatatatatatacacatatatatatataattattattattttagagaaacatttcagttgggagcagtggttcatgcctgtaatcccagcactttggaggctgaggcgggtggatgacctgacgtcaggagttcgagaccagcctggccaacatggtgaaaccctgtctctactaaaaatacaaaaactagccaggcgtagtggcaggtgcctgtaatcccagctactcagaaggctgaggcagaagaatcgcttgaacccagaggcagaggttgcagtgcagtgagatcgcgccactgcacttcagcctgggcgacagagtgagactctgtctcaaaaaaaaaaaaaaagaaaagaaacattttattttattttattttatttatttatttttgagacagagtctcactctgtcacctaggctggagtgcagtggcgcgatctccactcactgcaacctccaactccctgattcaagcaattctcctgcctcagcctcccaagtagctgggattacaggcatgcgccactacgcccagctaatttttgtattttagtagagacagggtttcaccatgttggccaggatggtctcgatctcctgacctcgtgatctgcccacctcagcctcccaaagttctgggattacaggcgtgagccaccgtgcccggccaacattttattttagaatagttttagatttgcagaaaaaaaacagtgaggataatagaatttcccacattccctacacccaatttcccctcttttatttatttattaaagacaggctcttgttctgtcgcccaggctggagtgcagtggtgtgatcatagctcactgcagcctttgacctcctgggctcaagcgatcctcccacctcagcctcccgagtagctgggaccacagatgctcagtaccacacctggctaatttttttactttttttgtagagatggggtctcactatgttgaccaggcttttctcaaactcctgggctcaagcgatcctcctgcctcagcctcctgagtagctgggactacagccactcaccaccatcacgcccagctaagttttgtattgtttgtagagacgggatctctgtatgttgcccaggctggtctcaaactcctgggctcatgtcatcctccttcctcagcctcccaaggtgctgggattataggtgtgaaccactgcacctggctaagaaaaaaaaaataggagcaaagatcatccgcaaccatccctcagctgtttcatttctgtttattacactacatgcatatttcacttactttgggatactgagatgtggccccggatgggcttctgaggacaactccatgcctgtaggaagtcgctggccccagggcgctcagcgggtgggggcgattctgctccaggggacatttttattgtcaccgcgggggctgggagtgccgctgccatctagggatgtaggccagggatgctgctcaacactacagtgtacaggacggccccccacagtaaatgatcaagccccaagtgtcagaggtgccaccagacgtgacaagccctgccctggggagaactgagtgcaggtttggagtcagacttgggctcaaattccatcatggcgaaccagctcctttccctcgggcctctgcttttctttctctctcttttgctctttctctctctctttcttttttgagatggagtctcactctgttgcccaggctggagtgcagtaatgcagtcttggctctctgcaacctctgtctccctggttcaagtgattgtcctgcctcagcctcccaagtaggtgggatcaaaggtgtgtgccaccacgcccggctaatttttgtatttttagtagagacggggtttcaccatgttggccaggctggtctcaaactcctggcttcaagtgttccacccgcctcagcctcccaaagtgctgggattacaggtgtgagccactgcccccagccaacctctgctttcttatagcgggggtgtgataacagctgcttcccagtcaattggaatgtccacacaaattagaaactgaaacagtatctccatcaactcagagaaaacagtaaaaagaaaataggcggtgagatttctcatcagttacattattctgactttaattagtgtccagggaaactgaaactatagctatacctaagataaacatttgaagaaggagtaaaggaaagattaattttgcagctgtctcagggtctggtggagggctgatggatgtcatcctgtctttgttttgcaccggggaaagtaagcttgtaatcagtgctgtcaggatgaaattcagcagactggttccgtggacaaggggtcacatagagcttgtaaacctaaggttacgtatctttgtttacgggaggctggacatcttggaaagatttaggagtaagcaaagaatttacgtatgaacaatttgtgagggtgatcatctggagatgtgtgagggctttttttttttttctttttgtaggcatctgggtaagctacaatgcttaaccacttaacacaatcaggaagcaacagccatgcattcgggaaaggaacttcagtgttgtgtggctcagtctccagacctaactttccctttggtacagacgcggtggtacatgcctgtaatcccaacacttaggcaggaggatcactcgagcccagaagatcaagactagtgtgagcaacaaagtgagtttccccccacccctcacctcaacaaaacatttaaaaattagctggacatggtggctgcgcctgtggtggctggagtgcagtggtgtgatcttggctcactgcagcctctgcattcaagcaattctcctgcctcagcctcctgagtagctgggattacaggcacctgccaccacgcctggctaatttttgtatttttagtagagaccgggtttcaccatgttggccaggctggtctccaactcctgacctcaggtgatctgccactcaggaggctgggtaggaggatcccttgagcccaaggggtaggagggtcccttgagcccaagagatcaaggatgcagtgagccatgttcgcatgactgcacacctgcctggacaacagatgagaccatgtctcaaaaacaaacaaaccaatacaaacaacaacaacttttcctttggcaaactgcctttggaaggtcctcatatttttattttctttgacaggaaaaagcaatatatagaaagtgcttagcttagcactttgtacattacagttccccatcatagtttgcccttgtcatttgataagttttggacttgactgcaggctttccttaaactgaactcccagaagtggggttactgggtccaaggggatgcctatgtcccaagctctcacttcccataaagaagaattcagaattcggccaggagtggtggctcacacctgtaatcccagcactttgggaggctgaggtgggtggatcacctgaggtcaggacttcgagaacagcctggacaaaatggtgaaaccctgtctctactgaaaatacaaaaattagatgggcttggtggtgggcacctgtaatctcagctacttggaaggctgaggcaggagaattgcttgaacccgggaggcggaggtcacagtgagccgagatcgcaccattgcactccagcgtgggctacagaacaagactctgtctcaaaaggaaaaaaaaaagaattcagaattcacctgtcgcctgctgctgcagtgaacagtgagtggcactcctctctcacacctatcacaggtattcttcttttccttccagatccttccctggcaccggttccaggaggacctcgttcttaggcagcatctgtgtctctgttttgtaagacacacagagtatccttaacccactgcagatatttccctgggtccatggtcaatcaacaccacctttcagtctccagcctcttaaccagcccagggctgagtgttgtttatagtattaatatgtttctggctgggctcagtggctcatgcctgtaatcccggcactatgggaggctgaggcaggcggatcacttgaggtcaggagttcaagaccagcctggccaacatagtaaaaccccgtctctactaaaaatacaaaaatgagccgggtgtggtggcgtgtgtctataatcccagctactcgggaggctgaggcaggagaattgcttgaacctgggaggtggaggctacagtgagctgagatcatgccactgcactccagcctgggcaagaaagtgagactccatctcaaaacaaagaaacaaacaaagtattaatatgttccccttgatcagtggggtggttcacccttgtaatcccagcactttgggaggcagaggctggcggatcgcttgagtccaggagttcgagaccagcctgggtgaactagcaaaaccctgcctgtactaaaaatacaaaaattaactgggcttggtggtgcgagcctgtaatcccagtggaggctgagacaggagaatccttttgtaatgcctgaccttgtttttttactaaccctattttaaccttgtttttactaaccctatttttaaattttccctttttgtctccttaattacctagccttgtttcccatatgagtagactctcccttagctgggaaagcctgacgaacgccatctggccccttgatttacaagacattaagggctacttacccaacccccttcctcaaagagttaacctgcgtaagcagatcctcagcatttcaaaggagcccaattagctgataaggtactggaacaaacaatgtacgaagttcccaggattttgctcaaaagcataacaacataaagccttgagtctgtgtctggcatagcatccatatctaactcttatgaaggatttagagcccggcacctggttccgttgctttttttgtaaccatttgtcttttaaattgtttatttctctgtaaccatttgttttttgattcttgcatgtttttacttctgtagaattattgcatttgagctccgctccccttccgaaccaaggtataaaagtaaatcaagccccttcctcggggccgagagaattttggaaagtcaagccttctcttggctgccggcttaaataaaggactcttaattcgtctcgaagtgtggcgttttctctaactcgcttgggtataacactttgagcctgcgaggcagagtttgcagtgagccgagatcacgccactgcactccagcctcggcaacaagagtgaaactccgtttcaaaaaacaaaaacaaaacaaaacaaaagaaccctcacaatcttcctgcacccaactgatgaaatcaccattgcaaaagttatatcagtgagaacattagaacagtaagctaagctaacccaaaccccaccttacttttcccttaattattcctgggctactgggtcgagctaactttggaagacatttaggctatggtttaaataacaggccttgccaaaaactcaaccacttatttttttgagacggagtcttgctctgtcgcccaggctggagtgcagtggtgtgatctgggctcactgcaatctctgcctctgggttcaagcaattctcctgcctcaacctcctgagtagctgggattacaggcgcatgccactgagtagctgggattacaggcgcatgccaccaagcctggctaatttttgtatttttagtagagacagggtttcaccatgttggtcagactggtctcgaactcctgaccttgtgatccacccacctcagcctcccaaagtgctgggattacaggcttgagccaccgtgcccagcctgctttttttttttttttttccttgagacagagtctcattctgtcacccaggctggagtgcagaggcaccatttctgctcactgaaacctccacttctggggctcaagcaattctcctctctcagcctcaggagtagctgggattacaggcgcctgccaccaagcctggctaattgttttgtatttttagtagagatggggtttcacccatgttggccaggctggtctccaactcctgacctcaagtgatccgtccaccttggcctcccaaagtgctggggtgacactgtgcctggtctcaaccaccctttttttttttttcctctgtcacccaagctggagtgcagtggcatgatcttggctcactgcaacttccgccttctgagttcaagcaattctcctgcctcagtgtccggagtagctgagacgacaggtgtgcaccaccaccccctgctaatgttttgtatttttagtagagatggggtttcaccatgttggccaggctggtttcgaactcctgacctccacccgccttggcctcccaaagtgctgggattacaggagtgagccatcactcctggcatagaaagtttttctcatccattgtcctcctcctcttctttcttcatcttcctcttccacttttttccaggcaactttagcaggaccctttgcaccgtcaaactttcctttcaacttacagtcagcaacctcttcctcatatttcttcttcagctttgccgccttagtgacgtcaacctgcttttcactgtcacttcagctattccacatctcacccagagctttttttttttttttttttttttttgccacatctccaatagagatgccagggtttgcggatttgatcttggggtggaattctgaacagaacatgaagaatccagacagttggttgggtgtgatggctcatgcttgtaatgccagcactttgggaagccaaggcaggtggatcacctgaggtcaggagtttgaggccagcttggccaacatggtgaaaccccatctctactaaaaatacaaaaattagccagacgtggtggtacgcgcctgtggtcccagctaatctggaggctgaggcaggagaatagcttgaacctgggaggcggggcttgcagtgagccgagattgcgccactgcactccagcctgggcaacagagcgagactccgtctcaaaaaaataaataaataaataaataaattttaaaaaataaaataaataaattaaataaaataaaaaataagagtccagacggtggccttttggggacattaggctctttcttcttgcttcccctttagctgctctataatccttcatttcccgatcctagtgtactttatccgcctttgccatttcatcaaatttggacttctctttcactgacactgtcttccaactctcagaatatttcttggaaaattctgcaaaattgacagggacctctgggtttttcttcttcttcttcctttttttttttttgagatggagtttcactctgtcgcccaggctggagtgcagtggcacgatctccgctcactgcaactttctcctcccaggttcaagcgattctcctgcctcaggctcccgagtagctgggactataggcgcctgccaccatgcccagataatttttgtatttttagtagagacggggtttcaccatgttggccaggatggtctcaatttattgacctcatgatccgcctgccttggcctcccaaagtgctgggattacaggcgtgagtcactgtgccaggccggtttttcttcttatgttcttctctgtacatctgcacaaaaaaactataagcagacattttgccctttggtttcttggggtcaccattagccatcctgactgtattgtttgctagtctgggcagcgcaggacacttgttcgctatttttctaaacttttcccccaatgggtgtaaaaaagcatattattattattattattattattattattattgagacgagtttcgctcttgttgcctaagctggagtgcaatggcgcgatctcagctcattgcaacctccacctcccgggttccagtgattctcctgcctcagcccccttagtagctgggattccagacgcgcaccaccacgcctggatagttttttgtacttttagtagaaacggggtttcaccatgttaggctggtctcaaactcctgacctcagatgatccgcccgcctcggcctcccaaagtgctgggattacaggtgtgaaccactgtgcccggcttaaaagcatattattatagtaaatactttttttccctttctttctttcattttaaacactggggtctccttatgttgtccaggctagattcaaactcctggactcaagcgatcctcccacctcagcctccctgttaccctgttgccatgacagccctgataaaataactgggaaagttctctttcttattgtaagtccaaaaaaaaaaaaaaaaaaggcacagctgcttaaagattgcagacagccagggatgtccccagaccttcttgacccctgaccagataccagaggaagataagatccctaaatcaccacaaactggaacagacgacctctagtcgactttagatcatcaatatataattataatgctaaaattccttctcttaaaagaaaatctccattttgtgtagatgggttgtatgaagacaacccaggaattgaggctcatgaattgagcctgcgtgtctggagtcccaccctgcacatgctagcattcctctcccttcctgtacccaggggaagaaacaataaaacgttatgctttttactgttgagggagaaggggcagttagagtgagagcctctccttctccattcctggccagtgaataaaacctgattgccttttccgattggatgttccttctttgccacctacacaaagtggggaggtaactcggtttgctggtggcatcctcagtagctgggactacaggcaataaattcttttatacgtcgctttttaaacgtattgtgcctgtgaacaaatcttcaagttatacccaagatttcaaagctcatgatggtccatagtactcgctctttaaatcaatagctgcgtatcccacagatgatttcctttgggatgatttcccagaactggaattgcagattcttcacaatgcatttttagtagagaaggggtttcaccacgttggccaggagggtctcgatctcttgacctcatgatccgcccgcctccgcctcccaaagtgccgggattacaggcgtcagccactgcgcgcggccacaaagctcccaacttttccgttaagcaccgagcttttttctagactagcagctgaggccggaaggaattctggggaacgtagtgcagacttgcagagaacgagtctcttggtcctgtgccgtagcatttccggcggaagttgctgggcgcggaaagccggcaagacctttttttccgccatcatcgctcacgcgcgcaaccctggcgacgcgtggtggcgaggctccgcctccccacgccattggccagcagctcctcgggcacgcgtatactgcgcttccgggcaatctccgccccccccccccgcatggccttctgggagttgtagttcggtcgcgagcgctgccgtcgggaggcgctccgaggttcgaggctgtgccccgcgaccccgccttcggcgctcggctcgcaggatggatcccgtacccgggacagactcggcgccgctggctggcctggcctggtcgtcggcctctgcacccccgccgcgggggttcagcgcggtgagcggcgtcgaggggcgggggtcgaatgggggaggcagtcgctgtggggtgggagtccggcgctgacccgcgtcctcccggtagatctcctgcaccgtcgagggggcacccgccagctttggcaagagcttcgcgcagaaatctggctacttcctgtgccttagttctctgggcagcctagaggtaagaggtgcccaccttcggaaccaccagggtctgcccacctcccctgcccattcacggtgccctatgccaggtgcgctgtccccgctgctagccaccctcgccgtgtcccccttccacccccagaacccgcaggagaacgtggtggccgatatccagatcgtggtggacaagagccccctgccgctgggcttctcccccgtctgcgaccccatggattccagtaagggctgcttcggaggcgagagttgtccgggtcccttgcagggaggagcgggggaggagggacgacgggcgcgcggtatctgagcctcggctgccccctggcacacggggtgatgacagggttggctgaggactcagagccctgccctagggtggaccgacatcccctgtcctgattcaaaatgtgtgatatgattggcacagcctgcatcctcgagttaagtgttcagtccacgccacctgtttcactactgttgtgctacttgtgtctttttacaccatagccaagcaaaaccactgcgcagttttctttttcatttccaggctttgcacacgccgcttcctctgcctggggcactttttctctcctttttgtagctcattctccgtcctccgtcagatgtcaccttcacccttccctacccctcctcttctgggcccacaaccctagtgcagccctcccagccccacctgaactttcccaccctttcttgtcatttttatttgactcaggctatattcattcatactagagttggcaaacctttttttttttttttttcttcagacggagtttcgctcttgttgcccaggctggagtgcaatggcgcgatctcagctcaccacaacctccgactcccgggttcaagcgattctcctgcctcatcctccagagtagctgggattacaggcatgcgccaccacgcctggctaattttgtatttttagtagagacggggtttctccatgttggtcaggctggtttcgaactcgtgacctcaggtgatccacctgcctgggcctcccaaagtgctgggattacaggcgtgagccaccgcacccggccaaactttttttctttattttttcttagagttggcaaacttttatgtaaagggccttatagtaaatattttaggctttacagggcagatgatgtgttttgcatattcaatttttttacaattccttaaaaatgtaaaaatcactcttaacacatcagctgtatgaaaccaggccttaggcttggtgtggtggttcacacctgtaatcccagcactttgggagcctgaggcgggcagatcacctgaggtcaggagttccagaccagcctggccaacatggtgaaaccctgtctctactaaaaatacaaaattagctgggcatggtggtgggcgcctgtagtcccagctacttgggaggctgaggcaagagaattgtttgaacctgggaggcggaggttggagtgagctgagattgcgccattgcactccagcctgggcgacagagtgagactctgtctcaaaaagaaaagaaaagaaaacagaccttgagccagatttggctcatgggtgctagttgtccaacctctataggattagagggctcatggaaagtaagttttgagggccacgatgggcacccagctctgtccgattccacagctagccaccccatgaatgcagcttcatatcaccaaagatcagcctactccagcggttcctaaaggctgcatggaatcccctccttcatctataccattcatgatttaaccactcctcccacccccatccccaatgttgtccatgtggctgccttaaacagcaccctggcgagcctcatcctagagtcatctttgggccttcccacccctgcctggcttccctctctcactcccctaccccccactcccagaggcctctgtgtccaagaagaaacgcatgtgtgtgaagctgttgcccctgggagccacggacacggctgtgtttgatgtccggctgagtgggaagaccaagacagtgcctggataccttcgaatagggtagggccaccccccagtgtctagccaccttccctgccctcccaactcatgatctcaccaatctgaccctcaaggacacccctgaggtctcctgttccttcttctaccttctgagcctcagattctgcatgttaaaaccgggacatatatatcatcttgtaggactgtcattaggagtcagtgacttggtgtctaaagtagacataacaggactgggcgcggtggctcacgcctgtaatcccagcactttgggaggctgaggcgggccgatcacaaggtcaggagatcgagaccatcctgactaacatgttgaaaccccatctctactgaaaatacaaaaaattagccgggtatggtggcacacgcctgtagtcccagctacttgggaggctgaggcaggaaaatcacttgaacctggaaggcggaggttgcagtgagttgagatcgcgccactgcactccagtctggggcgacagagcgagactccgtctcaaaaataaaataaaataaataaaaataaagtagacagaacggtgatttgaacccagcagtattagtttggtgtggtgcttcgggtgtgggtcaagatgctgaaacaaaaatcccccaaaagactgggcacggtggctcacgcctgtagtcccagcactttggaaggccaaggcgggcggatcacctgaggtcaggagttcgagaccagcctggccaacatggtgaaactccgtttctacttaaaaaaaaaaaaaaaaaaaaaaaattagctgggcatggttgcctgtaatcccagctaatccagaggctgaggcaggagaatcgtttgaacctgggaggtggagattgcagtgagtctagattgcgccattgcactccagcctgggcaacatgagcgaaactccgtccccaaaaaaaaaaaaaaaaaaaattcccccaaaagacagaggtcacctgcatgcccgggtcccccgccttctccaggggctatcctcaaccctggccccacaccgggccagcatccctcccaccttccctcctggtccagggacatgggcggctttgccatctggtgcaagaaggccaaggccccgaggccagtgcccaagccccgaggtctcagccgggacatgcagggcctctctctggatgcagccagccagccaaggtgagtcctcaggcaccggagtgggggtggccgttgtgggaggatgaggcttaacctgagtcatcccacctccagtaagggcggcctcctggagcggacagcgtcaaggctgggctctcgggcatccactctgcggaggaatgactccatctacgaggcctccagcctctatggcatctcaggtgagcacagagtggggaaactgaggcgtggaagtggagggtgtgactgtcttgagattacacaaccaggaaggatcttcctacttccctctcccaactctggattctgtaaagactgaaggagccaggctgtgcgggttgggcctctgtgggtggggtgggcagttccctacacctcacctcctcccctcgcacgtgtttttcagccatggatggggttcccttcacactccacccacgatttgagggcaagagctgcagccccctggtgagtcggggtctcagggagcctgggtctgcgcctgccatcaccattctgggtgccaggacatccctgtatccagtgccccagcacagagggccacatcctgggttggggctggagtgtgtcacctccaggtggcagctggaaggtcttcagtcttagaatggggagggatccatccagagaaagcagctggacaccagtagctagaggctgtgacaagaagggggagggatgctgggcatggtggctcacgactgtgatcccagcactttgggagaccaaggcaggtggatcacttgaggccaggagatcgagaccagcctggccaacatggtgaaacctcgtctctattgaaaatacaaaaattagccaggcgcggctttagagactttgtctctaaaaacaaaacaaaacaaacaagaaaaataagggggagggatgtccgagggaatattcggggagtgttggggggagggcaggaccccttgaagacgaaggaaagggggtttcaggttgagatcgggcccaaggctgacccacctctgcccgccaggccttctctgcttttggggacctgaccatcaagtctctggcggacattgaggaggaggtgggtgcagggctagggaggaggtgggtgcagggctagggaggaggtgcctgaggggccggcacccgcccctcgtccgccccaggctgtcccagttttccccatccccgctttgccccagacacacaccatctctccagggcagaagaccactcaagtccctaagtacccactctgccattcctcagtcactccccctttggccctctctttactctggcacctgttcactctctctctccccatcccccagtataactacggcttcgtggtggagaagaccgcggctgcccgcctgccccccagcgtctcatagtccctcacccttccgcggaaagagcccccttactccacctccccgccagcctggggccaccccccctcactgcatcctggggccacccccactcactgcatcctgggaaccttcgccctgcaaggcgtttgctatcttcagccactgggcggagctgcagccctggaggagggggcgggtcgaggctgcgtggtgatggggtctccgcccccacgccctgccgggcagggctggagctggacagaagccagtgcctttaagtcatttgtgtcaaaaccctctggggtccggaggctgtgcgggtgtcctcctggcaataaacactacccggttctcgccctctggagtcctgatcctgccgcctgtccacactaggcactcttgcaccgggcaagtgggtgaaatcatggcagggaggcggtgctgctgggtctcccgtttgttgttgttgttgttgttgttgtttgtttgtttttttctgagacgggggtctccctctgtgtcccaggctggggtacggtggcacgatctcggctcactgcaacctccgcctctggggttcaagcgattctcctgcctcagcctcccgagtggttgggattacaggcgtccgccactacgcccggctaattttttgtattttctatagacggggtttcactgtgttggccaggctggtcttgaactcctgacctcaggtgatccgcccgcctcggcctcccaaagtgctgggattatgggcgtgaaccatcgcgcctggcttgggtcttccattctacagagtgggaaacaggctcagggagtgagtgagtctggattctagatcatagagaagaccttgtcccggcccttcatcattgggcataataataaaacaagtactgtttctactgcagtggccacatccccaacacgcgatacaccattattacctcattcagtctccctacaacccactgggaagctcaggttttgttgccattttccagataaagaaactgagatggggatgctaaggccacaactgggactgaaacccagcaattgctgtcttttttcttttcttttcttttctttttttttttttgagacagagtcttgctctgtcacccaggctggagtgcagtggcgtgatctcggctcactgcaagctccacctcccaggttcacgccgttctctggcctcagcctcctgagtagctgggactacaggcacccaccaccacgcccggctaattttttatatttgtggtagagacagagtttcaccgtgctagccaggatggtctcgatctcctgagcttgtgctccaccctcctcggcctcccaaagtgctgggattacaggtgtaagccacagcgcccaggccttttttttttttctttctttttttttttgagacagcgcctcatgctgtcacccaggctgggtgaagtggcatgatctcgactcactgcaacctctgcctcccagattcaagtgattctcctgcctcagccggcaccccttgctgctgagtagctgggactacaggcttgggccaccataaccagctaatttgtattttgtatttttagtagagacagcgtttcaccttgttggccaggctggtctcaaagtcctgacctcaagtgatcccccgccttggcctcccaaagtgctaggattacaggtgtgagccactgcgcccggcccaggccacaccattttcatccaccaattcatacaaccttgttttatgtacatttgtttaaaaacaccttatttaatatctatggtggattcatttacattgaactcacagccaacagcaccgaaactcacgtctgcataaagcttctctataatggattttctccatgaggtgcatcacagacttttttttttttaagtattttatttttggcatgatcatagctcactgcagccttgacctcccgggctcaggtgatcctccaatctcagcctcctgagtagctgggactacaggctacactgggctaatttaaaattttttttgtactgatgggggtctcactatattgcccaggctggtcttgaactcctggccttgggcagtcctcctgcctcggctcccaatgtgctgggattacaggcatgagccgccgagcccagccattgcagccttttggtacttaggaagcctggacagcatttcggtgtctgggggaatttcaatggcaaaatcaccaacaaaaaccacaagaacatggccaggcacagtggctcatgcttgtaatcccagcactttgggaggccgaggtgggtggatcacctgaggtcaggagttcgagaccagcctggccaacatagtgaaaccccatctctaccaaaaatacagaattagccaggcttggtggcaggtgcctgttatcccagctacttgggacactgaggcagcagaatcgcttgaaccctggtgggtggaggttgcagtgagctgagattgtgccactgcactccaggctgtgcaacaagagtgaaactccatttcaaaaaaaaaaaaaaaaaaaagagaagaaattcaccaccctaaactcacaccttccttctcccataagtgcatgcccatggacgtgtacgatggctgctatgctgctgtttctcctctgggctgttgtagtcttgtggtggcccacattctgctgcagttggaaacatccccagatctctgtggtttagaaaagctggccaggcatgatggctgatacctgtaatcccagcactttgggaggccgaggcaggcagatcacctgaggtcaggagttcgagaccagcctggccaacgtagtgaaaccctgtttctactaaaaatataaaaattagctgcgtgtggtggcacacgcctgtaatcctagctgcttgggaggctgaggcaggagaatcgcttgaacccgggaggtcaaggttgcagtgagccaagattgcaccattgcactccagctttggcaacaagagtgaaactccatctcaaaaagaaaaagaagaactaaggctgtcatacttggagtctcacatctgtaatcccagcacttttgggggctgaggcacgaggatcgcttgaggccaggaggtcgaggctgcagtttgctatgattgcgccactgcactccagcctgtgtgacagagtgagaccctgtctctaaataaataaataagtaaggcagggcacggtgtctcacgcctgtaatcccagcactttgggaggccgaggcggacggatcacctgaggtcgggagttcaagaccagcctgaccaacatggagaaacccccgtctctactaaaaatgcaaaattagcggggcgtggtggcgcatgcctgtaatcccagctattcaggaggctgaggcaggagaatcgcttgaacccaggaggcagaggttgtggtgagccaagatcgcaccattgcactccagccttggcaacaagagcgaaactctgtctgcaaaaaaaaaaaaaaaaaaacagcctgggtgcagagcaaaaccctatctctaagtaaatgaataaataaatagcaaagctaaggcttatttcttagcggcaatagactttgttagttgtagtggtacagaaactggcctaatgggagggtcattttctcacagtgaggacggtgttgtctaaagaaacatccaagcttttaaataattaaagttggccagccatggtggctcacgcctgtaatgccagcactatcggaggctgaggcgagaggatcacttgagcccccgggagtttgagaccagcctgggcaacacagcaaggccctgtctgtacaaattaaaaattagccgggcatagtgatacctgcctgtgtagtccctgctactcgagaggctgaggtgggaggatcgcctgagtctgggaggtgaaggctgcagtgagctatgattgcataactgcactcctggctgggtgacagagcaagaccctgtctcaaaaaaaaagaaaaaaaaaatttgggactgggtgcagcggtggctcacacctgtaatcccagcactttgggaggccaagctgggaggatctgttgagctcaggagtttaagggcagcctgggcagcagtgaaacaccatctctacgaaaaaaacacacatgatcgggcatggtggctcacgcccgtaatcccagcactttgagaggccaaggtgggcggatcacgaggtcaggagttcaagaccagcctggccaacatggtgaaatcccatctctactaaatatacaaaaaaaaaaaaaaaaaaaaattagccgggcatggtcgtgggtgcccgtagtcccagctactcgggaggctgaggcaggagaattgcttgaacctgggaggcagaggttgcagtaagctgagatcacatcactgcactccagcctgggcaacagagtgagactccctcttaaaaaaaaaaaaagaaaaaagaaaaatccacacacatatataattcagatgattgttaaaagtaaacaaggctttattcaagactactgcatggaagattgagctcaactcggaatccacgaagttgtcaccaaggggggatttatagccacggagcagggcaagggggggtcagtggatagaaaattataaaggcttggggagtcaccttaaactctcttaataggatccttgctgaagccaggccagggcgatcagctatcaagaaactgacttagcaggattcttgctaaaactgggcgacacagatcaaagacaggatgggagccaaggtcacggcccaatgcagaagagatttcagaggactctgactcaagtttggccaagaagagagtctttgtcggggcggagacctggcctggccctgggaatctgagacgggggacagtgcgttctcctggaaggggaggtgagcggggatgatgcaaaacgtacgccctttccccaaactcttcagctgccttggaaaaactaggtctctgatgctaaggcacctgcctgcatctcctggctcccggcacacggatcatctgccaggtctcgcccaggctcctctggcgccagccacagaacccgatccagccagaaagcaaatgccgtttgtcctctctgccgtccttctcagctgccccaaaagcagccccagatctcatttcagggagtctgtgtgtgaccaggggcctgaggatgatccatcctggccttgggtccaactagaccaattgtcactgatgacagggccactcaccctgcaaaatcccagtcctctgagcccaggcaggcctggggactgcatcacgcaagggttagaggggcccgatggagcctaccccacctgcttctgacttgggtatcatcaatcctaacatttctgggctgagcttacatcatcttgggctactgaggaaggagctgagggccctgggaaccacagcactaagtccaggatccgtgcctatccttctcttcttttattattattattattttttgagaccgggtctcactctgtgacccaggctggagtgcagtggtgcgatctcggcagctcactgcaacctccacctcccgggttcaagtgattctcctgcctcagcctcctgagtagctgggattacaagcatgaaccactacacccagctaatttttgtagtttttggtttttttttttttttttttttttttgagacggagtctcactctgtcgccaggctggagtgcagtggagcgatgtcggcccactgcaacctccatctcccaggttcaagcaattctcgtgactcagcctcccaagtagctgggactacaagtgcccaccaccacgcccagctaaattttttgtttgtttgtttttgagatggagtttcattcttgttgcccaggctggagtgtgatggtgcagtctcagctcactgcaacctctgcctcctgggttcaagcgattctcctgcctcagcctccctagtagctgggattacaggcgcccaccaccacgctcggctaatttttgtatttttggtagagatggggtttcaccatgttggtcaggctggtctcgaactcctgacctcaagtgatccgcccacctcggcctcccaaagtgttgggattacaggtgtgagccaccgtgcccggtccttatttctgtatttttagtagagatggggtttcaccacgttggccaggctgatcttgaactcctggcctcaagtgatccacccgcctcggtctcccaaagttctgggattacaggcatgagccaacatgctggcctaatttttgtatttttagtagatatgaggttttactgtgttggtcaggctggtctggaacagctgacctcaagcgatctgctcacattgacctcccaaagtgctgggattacaggtgtgagccaccatgcctggccatttctcttttcttgagacaaggtctcactctgttacccaagctggagtgcggtggtgcaatcatggctcaccgcagccttgacctcctgggcacaatctatcctcccatctcagtctccctagtagctggaactataggtgtgtgccaccacacttggctacatttttacttttgtagagatggggtcttgctatgttgcccaggtgggtttctctcctattgcttactcccaggctccacaggggcatgggtactgagagtggcatttctggatagacgtgatcccagctcctctactcaatagctgctgaccttgagctgcggcttaaacttctctgcgcctcagtttctccatctttacaatgggaacctcaacattcctcatctcatgggatacgtgtaagggagaatgcataggacccgtgtctctcagctgcccctgatgactcttgaagaaacacctcttgactctgacaggcctttgaaggtggaaggtttctgcagcctgacatccaggcagaatggatgatgtgactccccgtgagtggcctctgctagtggcaaaccctatacttcctgtattcaaaagtggcagaggggctgggctctgtggctcagccctgtaatcccatcactttgggaagctgaggtgggaggatcacttgagtccaggagtttgaggccagcctgggcaacatagggagaccccagtctctatagtatttttttttttttccaagacagagtctccctctgtcacccagtctggagtgcagtggtgtgattgtggttccctgcaacttccatctctggggttcaagtgattctcctgcctcagcctcctgagtagctgggactacaggcgcccaccaccacccccggctaatttcttttttttttgacatggagtctcgctctgtcgcccaggctggagtgcagtggcgcaatcttggctcactgcaagctccgccttttgggttcatgccattctcctgcctcagcctctcaagtagctgggactacaggcgtccgccaccatggccagctaatttgtgtgtgtgtgtgtatttagtagagatgaggtttcaccgcattagccaggatggtctcaatctcctgacctcgtgatctgcccgcctcagcctcccacaagtgctgggattacaggcgtgagccacggcgcccagcctaatttcttcctttcttcctttctttcttcctttcctttctttcctttcctttctttcatctcttttttccttttctttcctttcttttccttcctccctccctccctccctctctctctctctttctttctttctttgtatttttagtagagacggtgtttcaccttgttggccaggctggtcttgaactcccgacttcaagtgatctgcccggttcagcctcccaaagtgttgggattacaggtgtgagccacagcgcctggccatgaccagctaatttttgtatttttagtagagatggggttttgccatgttggccaggctggtcttgaactcctagcctcaagcaatccgactgccttggcctcccaaagtgctaggattataggagtgagccactgtgccctgcctacttttcttttaaacagatagggtcttgctctgttgcccaggctggatcgtagtggttcaatcactgctgatcttcttgcctcagcctctcaagtagctgggaccacaggtgtgcaccaccatgcctggctaatttttaatttttttgtagagctggagtctccctatgttgcccaggctggtcttgaactcctggcctcaggtgatcctcttgcaagagaacatctttgacagatactgtccacaccctagaacataccagaatgctgacagagcttgtgtttgcgaggcctgtggaattaatggagacatttctacccttttcgactggggccttgtgcctatggcttgttgggtaggggagatcacctccgtttgtaaagaacgaaactgagtttgcattactgttccttaaggcaggtctgcccagctcccggaacactctgaaagccgcacgccaaacccatatcaggtgcctggagtctggaggttttggctgcagccccaggaccagccttgccctgcgcctcacctgattctggctgagataggaagatgctcggtaactcagctccccttccaggcagtgcagacgagggggcggttttcagccgggcctcccaagttggaaccttatcatttccaaggttcaagtttgaggtatcaggaggaagagcagggaccagcctagggtgaggttgctgaggtgcccagggtgcaattttttatttatttttatttatttattttttgagacggagtctcgctttgtgcccaggctggagaggagtggtgcggtcttggctcactgcaacctccgcctccctggcttaagtgattctcctgcctcagcgtcccgagtagctgggattacaggcacccaccaccatgtccagctaattttctgtatttttttttttttttttgtgggggacggagtcttgctctgtagcccagactggagggcagtggcacaatctcagctcactgcagcctccacctcctgggtcccggttcaagcgattctcccgcttcagcctcccaagtagctgggattactggcatgcgtcaccatgcccatctaatttttgtatttttagtagagacagggtttcaccaagttggccaggctggtcttgaactcctgacctcgtgatctgcccaccgtggcctcccaaagtgctgggattacaggcatgagccactgcgccggccttgctttatttttgtgtgtgtgggagggagcatggtggcacacccctgtaatcccagctactgggtggctgtggtagaattgtttgagcctgggagttcgagaccagcctgggcaatatagcaaaacaccatctctacaaaaataaaaaatacaaagattaaccaggtgtggtggtgcatgcctgcagtcccagctactctggatgctgagtcaggaggatcacttgagcccaggagtttgaggctgcaatgagctatgatcacaacactgcattccagcctgggtgatagagcaaacccctctctttaaaaaaaaaaaaaaaattaaaaatgtgttgaggtgaaaaatcacattaacataaaattaaccatttagaagtatacaattcaggccaggcgtggtggctcacgcctgtagcactttgaggggccaaggtggatggatcatttgaggtcaggagttcgagaccagctggccaacatggtaaatcaccatctctactaaaaatgtaaaaactatccaggcatgatggcccttgcctgtagtcccagctacttgggaggctgaggcaggagaatcacttaaaacagggaggcggaggttgcagtgagccaagatcgcgccactgcactccagcctaggcgacagagtgagactctgtctcaaaagcaaacaaacaaaaaatgtaaaaactagccgggcatggtggccctttcctgtagtcccagttacttgggaggctgaggcaggaaaatcgcttgaacccgggagacggaggtggcaatgagccaagattgggccattgcactgcagcctgggccacaagagcaaaactccatctcaaaaaaattttaaaaaggccaggagcagtggctcacacctgtaattccagcactttgggaggccgaggcaggggatcacttgaggtcaggagttcgagaccagcctggccaacatggtgaacccgtctctactaaacatataaaaattagccaggcatggtggtgggtgcctgtaatcccagctactcaggaggctgaggccggagaatcgcttgaacttgggagacggaggttgcagtgagccgagattgtgccactgcactccagcctgggagacagagcaagactctgtctcaaaccaaaaccaaaaccaaacaaaactaactggtggagcatgcgtcccagcctggggactacaaggggcatggcctggctctcacttttgcccttccttcccccgacccaagtcccacccatgggcctgggcttggccacgcagcacaattgaacattgagtaacacacagatagtgaatatcagagtttacttgtgggttgtgcaagacaggagacctttggagacccctctgttatttccttgagccccagaaactacccatgcctacaccccaaaagcagcagcagcatgagaacgattaacacacattgaggacctattgtgtgggggtccccggaatgcctcacatgaagtcatgtgtcttgtcagagcccttggagacagggccacttcgtgtccccatattacagatgaggaaactgaggcacaaagcagctaagccctcagccatgggtccacagccaggaacctgggtccagctctccagccgtgcccctggccctgggctgctccaagcttggcacacatggatttgaaatgttcacagcccgagggggtgcagtggattttgcagagtctgagacttgcacatcagcagcatggagattatggggttcaggtgagaatcctggctctggtgctcagtcctggccgtgggccccctggtgagtcactgcctctcttggggcctccgtttcctcatctgtgaaatggatggagacacttagagaatcactgcctaagccccccgctccccttatgcctgtaacagaatctcatccatctggacagccacatttcccagcctcccctgcagcaaggtatggccatttcgctctgttctggccagtgggatataaaaagaagggtttcgaggcttcctgggaagacttccaggagacacctagccagcgctggcctctgactttccctcagaatgaggaggtgaaggctggagctctggcaattattttgtgccacgaggcaaccttgaggacaaaagccaaggatgcaataaaatgagagaaaaatcaagtcctactgctactgcagctgaacccgaacctatctctatggtatccttttcttacaccaggtctctattcctcatccctgggctcacaccagtgtggagtccttccccatgctccctggtctgtggcccagcattcgacgcatctcgtgcgtaaccccgtcccagtgccccaggccagccgacagtgtccggtgcattctggatgcaggcaggctgctctcccagcctccctccagggctgcaggtgctgtggcagtggccatggacccaaaggggtccccaggctctggacaggttgaatagggggtccgacgatggataccctgctgaggctgagctctggggctggccttggagacttcggcagggcgggcgaggtcgtcttcaaaggatggcggggacaactcatggagcccacggcgggcagcccgggcagcccggaggagagtgtgggtcagcacagccaccagaaccagggtgcccgagccgaggatggaagcagctgctgcgcctgtctcgatctcgaaaagtagcaaggcatagatggacagtgctagggaaggaaacgactctcatttattcagtcaacaaacatttgccctccaagccctcagggagttcttgcacacagggagaaattacgaaaagccctgccacatgacaggcacatagaataggcatttaatcctcccacatcccactcgtgcatcatcatcacatccattttacagagaagaaagctggggcccagagaggttaggggactcctcaaagccacacagccaggaagtgacagaggtgggattttaacccaggctggtgggctccagagtctgtgctctgaagcacagtgctgcctccgaaggagacaacagaaagagactaatttcagcagctgtgggccagggcttccctgaggaggagctatttgagctgagaccctggggaagaagcagcagtttttgggagagctgaggaggatgacagctgcagggacatggcaagtgcagaggtcctgaggtggaaacacccaagagtgtccgaggctcagaaaaaagcaaaacgggttctggccgggctcagtggctcacgcctataatcctaacactttgggaggctgaggcaggtggatcacttgaggtcaggagtttgaaaccagcctgtgcaacatggtaaaaccctgtctctacaaaaaatacaaaaattagctgggcatcgtggcgggcgcctgtaatcccagctcctcaggaggctgaagcaggagaattgcttgagcctgggagatggaggctgcagtgagccgagatcgcaccactgcactccagcctgggtgacagagtgagactcagtctgaacaaaaagaaaagaaaaaagaaaaatgggttgtgtagctggagcagaaaggtggagaggtgggggagagatggaggagttaaggaaggagtggatgttggggaccagatgagggtgggggccacagaaaggggtgtgggtcttctccttcttctccttcttcttctttttcttcttgttcttgttcttgttcttctttttttttttttgagacagggtcttgctctgtcacccaggttggaaggcagtggctcggctacagctcactgctgcctcaacctccccaggctcaggtgattctcccacctcagcctcctgagtaggtgggactacaggtgcatgccaccatgcctggctaattttttttttttttttttttgagacagaatcttgctctgtcacccaggctggagcacagtggtgtgacctctgttcactgcaacctctgcttcccgggttcaagcgattctcatgcctcagcctcccaagtagctgggattataggcacccaccaccacgccagctaatttttgtatttttagtagagacagggtttcactatgttggccaggctggtcttgaactcctgacctcaggtgatccgcccaccttggccttccaaactgctgggattacaggcatgagccactgggcccagcctgatttttgtatttttagtagaaacggggtttcgccttgttgcccaggctggtctccaattcctgagcgcaagtggtcctctagccttggcctgccaagagggctgggattacaggcgtgagccactgtgtcctaccgggttttcttctaagagcaatgagtagggggattttggagctggggaggaacaggacctacctgctctatctttttttttttttttttttgagactgagttttgctcttgttgccgaggctggagtgcagtggcacaatctcagctcactgcaacctctgcctctcgggttcaagcaattctcctgcctcagcctcttgagtagctgggattataggcatgcaccaccatgcctggctaattttgtatttttagtagagacaggggtttcaccatgttggtcaggctggtctcgaactcctgacctcaggtgatccacctgcctcggcctcccaaagtgctgggattacaggcattagccactgcgcccgacacctgctctatctcttaagaagcctcccttgccgggcacggtggctcacacctgtaatcccagcactttgggaggccgacgtgggcggatcacaaggtcaggagatcgagaccatcctggctaacacggtgaaacctcatctctgctaaaaatacaaaaaattagccgatcgtggtggcgggcgcctgcagtcccagctattcaggaggctgaggcaggagaatggcgtgaacctgggaggcggagcttgcagcgagccgagatcacgccactgcactccagcctgggtgacagagcgagactccatctcaaaaaaaaaaaaaaagcctccctgttggtggaatacccatatgagggaatatgatgcagcatgtaaggaatgaggcaccgctccattctacaatgtggatgaaccaggaaaacatcgttctgagtgagagaagccagatgcaaatagccacagagtgtgaggtgtcattgatctgaaatgtccagaacaggcaaatcctggccgggcgcagtggctcatgcttgtaatcccagcactttgggaggccgaggtgggtggatcacctgaagtcaggtgttggagaccagcctggccaacatggtgaaaccctgtctctaccaaaaatataaaaagtagccaggtgtggtggcacgtgcctgtaatcccagctacttgggaggctgaggcaggagaatcgcttgaatctgggaggtggagattgcagtgagccgagatcgcgccgctaccctctaccctgggcaacagagcaagacgctgtctcgagaaaaaagaaaaaaaaaaaaatacaagcaaatccatagagacagacagtagattagtggcttccagggatgaggaaggggcaatggggagtgattgctaatggagacagggtttcctgttgggtgatgaaaatattctggaaccagatagtagcgatcgttgcctaagaccgtgaatgtgctcaatcccactgaactgttcactttaaagtgggtaacggctgggcgaggtggctcacacctgtaatcccagcacttttggaagccgaggtgagaggttgcttgaggccaggagttcgacgccagctcaggtgacatagggagaccagtccctacaaaaaataagaaactatcgaggaatggcagtgcttgcctacggtcccagctagctgcggggctgaggcagaagaattgcttgagcctaggacatggaggctgcagtgagctatgatcacaccactgcactccagcctgggtgacacagcgagaccctgtctcaaaaaatggaaataaaatacactggttaaaatggtattttttttttttttttttttttgagatggaatctcgctctgtcacccaggctggagtgcagtggcgcaatctcggctcactgcaagctctgcctcccgggttcacgccattctcctgcctcagcctcccgagtagctgggactacagccgcccgccaccacacccggctaatttttgtatttttagtagagatggggtttcaccttgttagccaggatggtctcgatctcctgacctcgtgatctgcccgcctcggtctcccaaagtgctgggattacaggcgtgagccaccgcgtccggcctaaaatggtaatgtttttgttatgtgtactttgccacagtgaaactgcaacttaactgggtatggtggtgtacacctgtagtcccagctacatggattgggagactgaggcaggaggattgcttgagccaggagttcaagtccagcctgggctacatagcaagaccctgtctctaaacaaacaaaaccagaaacacccccagcaactcagctctcagggtcctgcatctctgtctgtctctgcctggggtgggggtgagggtcaaggtggaggagccagcctctgctctctactctctggtgcccacaggtttgccacgccccaggcttggggggcattgagagattcacaacccctctctggcctcagttagccaatgtgaataagaagggaccttgagggaccgggcgtggtggctcacgccagtaaccccagcactttgggaggccgaagtgggcggatcacttgaggccaggagtttgagaccagcctggccaacatgatgaaaccccgtctctgctaaaaatacaaaaattagctgggcgtgctggtgggctcctgtaatcccaggtacttgggaggctgagggaggagaatcgcttgaatctgggaggtggtggttgcagtgagctgggatcactctactgcacttcagcctgggcaacagagcaagactccatctcagagaaaaaaaaaaaaaaaaaagaagggactttgaggacctgagctagctagccctccatcagcctctccagcatacagttggcaccattcttagtggtggtgcatcgtaggacgtttagcagcttttacccactagatgtcagtagcatcccaccctcaactctgtggcgaccaccaaaaatgtctccaggcagtgacaaaagttcctctgaggccagaatcagtctcagtggagaatccctggtttggtccctatctctacactgcagagtggatttgggatcactaagccactttggcatcaatgatgtcctcattggaccaagctcagccaatcagagcattaattgcttcccctgatgttagtgattggtggaggaatattacatggcccaagctcagcctatcagagtcagccctgagactttagcctgggctactgggacagatagattttcctgcagcgtctagggtattggtaggagaggggcccagaacacatgggggacttttttttttggcactttccaggctgtttatacgcgttctctggctctgtactattgctttggaagatatcacactgcatgatgtcccacatgtgaaagcaaggccaaggactttttttttttttttggctggaaacattttgaaagggattttgtaattattcttttagttctagctagcgatgaatggatgattggttggatgtgcttgggaattcttgctgaatgaggtcacctagcctcaaaaacaatctaaatgggaggtgaatgaattctcaattttacgcttagtgaggctgacataatgttaccttttttttccttttgtaattgttcttgtattttagaatgaggatatcttattccctaggtctttaatatttctgttggcctgtgcaaagactcaaggctccaggcatcgtgtcaaaagtgcttacagatagaggcatctttctcagagagaagcccattcagggaacagcagatgaacaggtgaagtgacaagcatttctgtttcttttttcttttattattattattattatcaacaacatcatttttgagacagagtctcactctgtcacccaggctgtgcaatggcacaatctcggctcactgcaacctccgccccctgggttcaagcgatcctcctgccttcagcctcctgagtagctgggtctacaggcatgaaccaccatgcctggctaatttctttcttttctttcttttttttttttttttagatggcatctcactctgtcgcccaggctggagtgcagtggcatgatcttggctcagtgcaacctctgcctcccaggttcaaacaattctcctgcctcagcctctggagtagctgggattacaggggtatgccacaatgtttggctaatttttgtatacttagtagagatggagtttcaccatgttgcccaggctggtctcaaactccacctcaagtgatccactcgcctcggcctcccaaagtgctgggattacaggtgtgagcaaccacacccggctgagaggcatttctgataacctaatttgagtgcctggatccagccacacctgaagccaacttcccctgacaatttcagatgcacaagtcatccatcccttctcctttttttaaaaaaaaaactacttctggagcatttcattaagtcaaacaacaaaagttatgcagtgttccgtgcacttcacatatataaattcccacagtgagccttaggctcacatctcattaaaaatattttgagggcctggcgtggtggctcagggccgggcgtggtggctcacgcctgtaatcccagcactttgggaggccgaggttggtggatcacctgaggtcaggagatcgtagaccatcctggctaacacggtgaaaccccgtctctactaaaaatacaaaaaattagctgggcgtggtggtgggcacctgtagtcccagctactcaggaggctgaggaagaagagtggcatgaacccaggaggcggagcttgcagtgagccgagatcacaccactgcactccagcctgggcgacagagcgagactccgcatcaaaaaaaatttttttaatatatctttttaaacatttatttatttatttatttatttatttattgagatgaagtttcagtctgtcacccaggctggagtgcagttgcacgatcttggctctctgaaacctccacctctcaggttcaagtgattctcccacctcagtctcccgagtagctgggattacaggcagctgccaccaggcccagctaatttttttgaatttttaatggtggggtgggggggcggtttcagcatattggccaggctggtcttgaactcctaccctcaagtgattcacccactttggcctcccaaagtgctgggattataggcatgagccaccgcgcccggcctaaatatctttttaaatttctattttctgtggtgggactatgaaaaaaaaacagtaatagcaaatcctgtttttcattcagtaggatattttttcttcctgtaaaacagattgtttacagggctggcagggacttatatatgattcagcattgagtccgcagcatcatcaacacatttgtttcaagattaaaaccaaatataaggcgttaggagtctcttgaaagacacttaatgatttcattcctttaccagcccggatggatgaaagaaagttgattgaagaaaagttattacaaatcaggaaggaaggacagtgtgatgcgttccagcatctggggtatccttttttttttttttctcaagccatttttgagctggagattgatatttgtaaccaaaacagctttcactcattccaacctgtaaaatgctatctttttttttttttttttttttttttttgagacggggttttgcccttgttgcccaggctggagtgcagtggcacgatcttggctcactgcaacctctgccccctggttcaagtgattcccctgcctcagcctcctgagtggctgatattataggcgcccaccaccatgcccggctaatttttttgtatttttagtagagatggggtttcaccatgttggccaggctggtatcaaactcctgacctcaggtgatccaccagcctcggcccctcaaagtgctgggattacaggcgtgagccactgcgcctggccaaaatgctatctttagacaccacgcaggccatgaaaatttttgttcaaacaaattataaaactgatgaatcagaagtgttctgatgacagctagcatttgtggagtccctgctggagtcagatgccatccacgggcttttttttttttttttttttaatgagatagggtctcgctgtatcacccaggctggagtgcagtgcagtggggtgatcatggctcactgcagcctcaaccttcgggctcaagtgatcctcccaccttagcctcccgaggagctgggactacaggtgtgtaccaccacaccaagtctatatatagatatataatatataaatataaatatattatataaatatatattaatataaacatataaatataaatatatatttatatatttaataaatatatattatatatatatatagttttttttttttttgtagagatggggttttgttatgttgcccaggctggtctcaaactcctggcctcaagcaatcctcctacctcagtctcccatattgctgggattacagatgtgagctactatgcctggtcctatgggctttcatgaggattaaatctcagaatctcctcaagtgattctgtgaggtaatgacagttattcccattgtactgatgaggaaatcaaggcacagagagactttgcccaaggcaccaaagcaaagaagtgtcagagcctggagttgaactcaaggaggctgtctgcagagttgatcccagttaggggaccattgctgctctctacccagcccagggtcccatgccccacgttctattccagcacacacctgctaaatagacggagatcccacagcagaaaaggccaagggccacatgtctgaggaggcggcagtcgtagagaaaccagtcagacctggaatgaaggggagcaggaagataaagggttcaggaagtggagctggtggggggaggtcagtgaggacagggagggagagccgcttaaatgagacaaggacccagctttcagggacccaaaatctatgtgagtacctaaccatcatccatctacttgcccacccatttacatccatttacttatccactctccatctatccatcaattcatccatcagctcatgtatccatcagcccatccatccatctatccacccatttatccattcatccattcatccatttatccacccattcacccatttgtccactcatccatccatccacccatccatccatatgcccattcatccatccacccacttacccatccatccatccatccatttatccattcatccattcatccacccattcatccatctgtccacttatccatccacccatccatccatccatacttccactcatccatccatccacttatccatccatccattcacttatccatccatcaaaccagtcatccatccactcattcattcatccatccacttatcaattcattcatccatccacttatccatccatcggccccacccattcatccatccatacaatcatttagatatccaccatccactatctgatatctatccatttatctatgctccatccatccacacatccatttttccaagtcagtgtccaccatccatttaccattcatattcattgattatttgaccagcactcatatacagccttccatccatttaaccatgtgctattcatccatccatccattcatttaaacaccctctgctatcctatctatccatccctcacccacccatccactggtcatccatcttccattcactatccatccacccctcatccatccatccatccatctatccatccatccattcatccttccttacttcgatccatccaccatccattctctttcccctataacccatctatatgcatgagtccactcaaacactcaacactcaggatgcagctactatgtgcagatacttgctacacacctggcttccattattttacagactacaagcttctttgagagatgaggaaactgagtttcacatgctgttattgatgatacaaaccgcgaccccaagaggtgagactgattgaggaggaagtggaggctataagagcttccatcctcactcagctcccaccagtataatgaaagtggacgccttccccatcttcctgtcgccttccctcctgtccccttttcagcacagtggctagaggtggtcattcaaaacctaaatcagatcaccttcctccttactcacaaccctccttagcagaagaaatcccaaagtcctatctcctctctatcccatctctctgtttcctttccttctcagcactcattaccatctgctattattattattattagagatgaggtctcactatgttgcccaaactagagtgcagtggttattcataagcatgatcatggctcactgcagccttgacctcctgggctcaagggatcctcttgcctcagcctcttaagtgtatgggactacaggcatgcaccaccacacctagctaattattattttttctttttgtagaggcaaggtcttgctatattacccaggctggtctcaaattcctggcctcccagcactttgggaggccaaggtgggtgggtcatttgaggtcaggagttcaagaccagcctggccaacatggtgaaaccccgcctctactaaaaatacaaaaattagctgggtatggtggtgggcacctgtaatcccagctactcgggaggctaaggtgggagaatcgcttgaacccaagaggtggaggctgcagtgaaccgagatagcgccactgcactccagcctgggtgacagagcaagactctgtctcaaaaaaaaaaaaagaaaaaaaaattcctggcctcaaatgatcctcctgcctctgcctcccaaagggctgggattgcaggtgtgaaccaccatgccttgtccttgttatgtttccttattttctgtgaccccatgagagcaggtctgggtccacttggtccccgctgtctctgatgccctgagccagatccattcccctgcaggcaggcacccaacagatgtttgctgacccgtgggacccatgcatttcattgtcccttgggtggaaggtgcatggtctggataggatctacctcaatggtgggagttctcatctgctcaatttcacagaattctggactagaatttgggctcctctcccccgacattctggagagaaacactaccatgtgggacagcggagtcctcagctcaaggagggttcctccttccacaaccactgcccctgataggggtccctcaatgaccacatccctgactgagttcaggtccctgaggaaggaactcaatttcagaccaggacacaggctctggctggctctacccagaaccaagttcaagtccagcactgtcccgcctcccacccacttccaagccagacagcctgagagctcagcctcccctgtttgagatccaggcaagctgatcctggaccctctttgagcctcagtttcctcatctgcaaaatgcgagacacagcagtggttgcacctgctgcaaaattgaacaaatatagaatggagggagggaaggagggaggaggagaggaaaggagggaggcagagagacatggagtggtggggagagggaagtggggagggaagctgtccccccagcctgaggccaaaagaggggaagaggctcaaccaggctcacccagcccccagccgggcctccgaggcggtgaggccagtcctcctacctcctggggccaggcccccgcgccagctcggcgcccaggtggccacagagcgcggcgagcagcaagcaggtgaaccccagcacgagcaccagcgcggccagcgcggcggccagcggcagcagcgtcccggccgcgtcctctggcagcccggggccggcgcccagctcctggcccagcccctcggcgcgcagcccccgcagctcggcgcggcccgcctgcagctgaaacagcagctgcgcgcccagcgccgccagcacggccgccgcgatgcccagcagggtcattgcagccagcacccggccgccgtaagaacgggccatggcgggggttcctgcgggccgggggaagagttgaggaattgaagtggttttagagggcaggggagttggggggaatccgagggtcctcagggggtccccgagggggcggggccgcagggagtgtctgaaagttcggggactgggctgggggtcgccagacggacgggggctccggggtgctggtcgcagccgggacgccgaatctccgcgaaaacttgggacaaagtcttttctcctccctcccggggccccgcgggcgccccctcttggtccgctgggcctggcggggcggggcctggcaccgggcgcagggcggggaggccccactagggactggatcgcgggaaccccacagctcgctaagttcagaaaagggcaccaccccgccccctgccgccctaagcatcgattgtattgtggtttaaaacaagaaaaaggaggccgggggcggtggctctcgcctgtaatcccagcaccttgggaggccgaggcgggcggatcacaaggtcaagagttccagaccagcctggccaatatggtgaaaccccgtctctactaaaaatacaaaaattagccgggcgtggtggccggagcctgtaatcccagctactcgggaggctgatgcaggagaattgcttgaacccaggaggcggaggtttcagtgagctgagattacgccattgcactgcagcctgggcgacagagcgagactccgtctcaaaattaattaattaattaattaaaaaataaaaaataaagagaaaggaggccgggcgcggtggctctcgcttgtaatctcagcactttaggagtccgaggtgggcggatcacttgaggtcaggagttcaagaccagcctggccaacatggtgaaacccccgtctctactaaaaaaaaaaaaaaaaaaaaaaattagcccggcgtagtggtgcatggcctgtaatcctagctactcgggaggctgaggttggaggaatgcttgaatcagggaggcggaggttgcagtgagccgagattgcaccactgcacactccagcctggctgacagagtaagactccatcaaaaaaaaaaaaaaaaaaaaagagagagagagagaaagggctgggtgaggtggttcacaactgtaatcccagcactttgggaggctgaggcaggaggatggcttaagcccaggagtttgagaccagcctgggcaacatagccagaccccatctctacaaaaaataaggaagtcagcctggtgtggtggtgcacgcctgtggacccagctactttcgggactgagacaggaggatcgcttgagcccaggaggtcgaggctgcagtgaactgagatcacgccactgcactccagcctgagtgacagagcgaggctgtgtctcaaaaaagaaataacaaaatttaaaaattcacttttcatttgatctcaacccagggactctgtcattggctgtgatttcccctctgcttacttccttcaagcctttgggtaaccgttgcttcctctaggaggctagggagaatcctggatcccttccccaactggtcccccaaattattcgcacagcactttaaaaaaatcgagatgaaacttacataacataaaattaatcattttattcagtggcatttagtgttgtacaatcattacctctgtctagctccagaagattttcatccccccaaaaggagaccccatccccattaccagccactccccattccccctcctcaagtggctcacaaccattaatctacttcttgtctctgtcgatttgcctgttctggacacttcatatcaatggagtcatacaagaggtggcattctggcttctctcactctgcatgatgtactcaaggttcatcgaggttgtagcatggatcagtgcctcattcctttttatggctgcgtaatattccatagcgtgtctggaacacattgtgttcatccgttcatccattgatgggtatttgtgttgttggttccttttggtgaaggtgactaatgctgctataaacatgtgtgcacaggtatcttcttgagtcactgctgtcaattcttgtggggcgtggactcctaggagtggagttgctgagtcacatagttactctattttaactctttgtggaaccctcaaacttttccacagcagctgcaccgttttccatttccaccagcaatgtctgaggtttttaaaaataattttctgcacatcctccccaacacgtgtttcctcctgccctcctcctcctcctcttccttctcctcctcctcctcccttccttctcctcctcctcctttcttcctcctcctcgtctcctcctcctccttcttctttttttttttatcagggccttgctctgtcacccaggctggattgcagtggtgtgatcatagctcattacagccttgacctcctgctcaagtgatctttctgcctcagcctctccccaagtagctgggaccacaggcaagcatcagcatgcctggctaatttttaagtttttttttttttttcatagagatggggtcttgttatgttggtctggtctcaaactctttatacccaagtgattctctcacctcagtccccctaaatgctgggattacaggagtgagccaccacacccagcctcctccttcctcataatagcctttttttttttttttttttttgagatgaactctcactctgttgcccagactggagtgcagtggtgagatctcggctcactgcaacctccacctcccgggttcaagcgattcttgcacctcagcttcccaagtagcaggattacaggtgcctaccaccacactcagctaatttttgtatttttagtagaaacagggtttcaccatgttggccaggctggtctcaaactcctgcctcaagtgatcctcccacctcggcctcccagagtgttggaattacaggtgtgagccaccatacccagccagtttttaaaatttttttgtagagatggggtcttgctatgttggtcttgtctcaaacttcttatgcccaagtgatcctctcacctcagcctcctgaagtgctgggggattacagagtgagccaccacacccagcctcctcctccctgataatagtcattctgatgcttataaagtaatatctcattgtggtttttatttgcatttccctaataactaatgatgttaagcatcttttcatgggctttttggctgttcatatatcttctttggagaaatgtctattcaaatcctttctctattttaaattaattaattaatttttttgtagcgatggggtcttactatgttgtccaggctcatctggaactcttaagctcaactgatccacccactgggcctcccaaagtgctgggattacaggcatgagccactgcgcctggactggaatcaagtttttttttcaggtttgaaaattttggggccccttgaaaagagtttgtgggccctgtgccctcagcctcgtaggtaaaatggccccaaggaagagtatggggtgagggtgacccttcacttccaggtggcctccttctttgctgtgtgactttgggcacatcccttaacctctctgggcctcttcatatgtagcaagaacctgttccttctttcaattgattgatcgattgattgattcattcactcattcatcaggcctcagcccaacactcattctttcatcatcatcagtgttagggtgaattttccatgttttccaggtaaggaaaagtctcacgttgagggctcagcaattcatttggatcagggctacagtttgctctgggtggtgggaatacagagatacaagatattttcatgtattcattcgacgaacatcagtggagagcccatctacgtgctgggctctgaggacccaggggtgaccaagacaggcccagctctcccttctggtgctcacagcctggtgggggaggtggaaacatacatgaaaccccacaataaggggacacttacctaaatggccaacattcattgcagtgctggcttaggttttgccattatttgttggggttgggggaacacagataccaaggtctggtcctgctgtttgtatgtggggtgattctctagtttgggggtgtctggcttcaacttggaaagttaaccctgcaagcaggccccacactgctcttggtagatggtgagctcatctaccttggccttttgctaagctgcccttctcattccagctcagacaggtggggagtggggaggtggggatggggggtgaggcttggagagttccaccatacagtccaaggcacacagcctgacagggacagagagtggactccctcaacctcactgcccagatacggatggctggtcactgcatgttggctggaataatagtaacaatgttgacaggttacatcgcctgtgatttgttggaaaagggcaacctggtatgatttacagataatttaagtgatttttatttttttgagacagagtctccctgtgtcgcccaggctggagtgcaggggtgcaatcttggcagactgcaacctccgcctcccaggttcaagtgattctcatgcctcagcctcctgagtagctgggactacaggtgcgtgccaccacgccagctaatttatatatatatatatatatatatatattttttttttttttttagtagagacggggttttgtgacagtggccaggctggtcttgaactcctgacctcaggtgatccacttgcctcggcctcccaaagtgttgggattacaggagtgagccaccacgcccagactcaatgcacccatttcacagatgcgccacagcagtccagagagggctgctggaacatgaagcatcaggcagcaccagggtcctgagctgggtcaattttccaacctggaggttggaagtcgaggtgagcatgaaatcaggtggtcatccagtattcaggaccctctggcctcccaggcccccagcctccttcttcctgtcagccagattcccgtgcaccgcagtcacgcttgctagtttccatggacacgcgtggactcctaggaaaccttttccggagactgggcacgagaggagtgatttgcatctcatttgaatgctaggccctgccccgaaagtgtgccatctcgtcctgccgcgagggggcgccagaggccaaccaagcagttcgtgagccgagtgagcacctgctcctccttcttcactgacctgcctgggagaacctggctttaattctaatttttcagaggaagggattagtgtttagagaagggagttgatctcacggtcacaaagccaggagatggttctagatcggagtttttgatttctgtattctgccgtgttccctggtaatgccccagtccacgagcaacagagggagacctgggagactcttggctcctgctggcagcccgggacccccagcccacgtggtatcaaatattgaaatgcatccgtgtaacatataaatctgttgttaaaggattgttgtgattttgcgcatgaaatatgtgggcaactcggccggacgcgatggctcacgcctgtaatcccagcactttgggaggccgaggcaggcagatcacctgagatcgggagttcgagaccagcctgaccaacatgaagaaactccgtctctactaaaaatacaaaaattagtcaggtgtggtggtatgcctgtaatcccagctacttgggaggctgaggcaggagaatcgcttcaacccgggaggcagaggttgcggtgagccgagatcgtgccattgcactccagcctgggcaacaagagccaaactccgtctcaaaaaaaaaaaaagggggggggcaactcatttaatgtaggatgggcttggcgttttcagcacgtttgttctattttagtttagattttctcatttttggagccattaattactccccctcagccaggtctcagaaatatttatagagatccttgaaaagctctccctactttatctcctggccagggaggctcagatgcgcacctggaagaccagaacagatccctgggtgtgaggggatgtctcagaagagagaatcccctgccactcgctccatcctagctcccacccttccctgcatggggatcagaacagactccccaggtcctgtcctgcttctccctgtggatcttattacactccctctgccctgacccctcctggggatgggctcaaaacagacatcacccctacccatccccacttcgcctccacccctcttcatcatgggagctcagaacagccccccagcccctcctgcccccagaggagtgctcagaacccagacagtcccctacctcgtgctcccacagtgagctccgtcccgccctactcctgcgcagatctctgacaatcccctcccctcccctctcctcggcttccaagaggctcattacagattcccctcccgcggcctgcccacctggggcagaggaggactcagaacagccttccgacttccatccagccctctctctccgcagtggggggcaggcttttcatagaccggtcacccctccaccagtcttccccaactatggagtcagaacagcccccctcggccccaccctccgccttggcaacccccccccaaccctccgccggggcacccccaccccacatccctcccccactccctcccagctctccacctccggagtggaggggttcatcaccaaaccccaactcctccaccctagggggtcataacatccgcccttggccctgccctccgccctggcacccccacccccccacccccatcccgctctcttacgggggcggggcggggaaggagggtttccttttgtgtttttggggacagggtctccctctgtcgctcaggttggagtgcagtgtgcaagtggtgcgatcacggttcgctgcagccttgacctcccggactcaatccattctcccacctcagccttcagggtagctaagccacaggtgcgcgccaccacaccgggctaacttttaattttcgtagagtcagggtctcactctcttgcccaggttgatctcgaacctctgggctcaagcgatcctcccgccttggcctccccaagtgctgggattacaggcgtgcgggggtggggtgggggtggaggttcatcaacaaaccccactcctctcctccaccctagcgggtcagaacagccccccggccccgccctcctccccaccccctcccccggggtcgcgcccgcctcgcgccgccttttccacgcggtacttgtggcggcgcaggcactcggtgaggctccgtggctcctggtcctccaggtcctctggcagctggaagttgcggtccagcacctcggccgcctcctgccagttggcgaagcaggcggtgcccaggcgctggatctcgtcggcgccgtcgcgagtgagcacgtccccgtccggcttgagcaccacgaccgccggcaggcgctccactgagaactggcgcccgaggtccctgcggagcgggcaggtcagtctggacggatccacatccctgatgctgaaccagagagccccacatccctcctcccagtacttaggcagcgccttctgtgtgcactgcctcttgccgggcactgggtaggtgcacacgaggaccgggacagggccagacactttggtccccgcgctttgtctccagcaccccaggcatgctccaacctcggggcatttgtgctggctgtgcccacgtctggagcgctctcctcagacatttgcaggctaagaccctgtagtatggagacctcacatcgcaagacacaaggtcttactacatttatttgtagtaagaccctgtctctacaaataaataaataaataaataaataaataaataaagcagggtgtggtggtgcgctcctgtagtcccaggtactcaggaggccgaggtacctgggacttccctcgagaagtatcccttgagcccaggatttcgaggctgcagtgagctatgattgcaccactacactccagcctgggtgacacagccagatcctgtctcgaaaatagaataaataacattccaaggcagtgtttttctccaaagtgcctttcagcacccaacatcatgtatggtttttaaaatttctcctgcttggccggcgtggtggctcatgcctgtaatctcagcactttgggaggctgagataggcggatcaccggaggccaggagttcgagaccagcctagccaacatggttaacagttcttaatttcagcctgctgcattcttccgtggcccttttccaggctgccacaaagagaacccatgatacttacaaaatcccatgagtagattgccaggtttagtaattaaaaatataagacactcacaggagatcgagaccatcctggctaacacggtgaaaccccgtctctactaaaaaatacaaaaaattagccgggtgtggtggcaggcgcctgtagtcccagctactcggagaggctgaggcaggagaatggcgtgaacccggaaggcagagcttgcagtgagcccagatcacgccactgcactccagcctgggcgaagatactccatctcaacaacaacaacaacaacaaacaacatatatatatgacactccctctcttaaaaaaaaaaaaaaaattggaggctgggtacagtggctcacccctgtaatcccagcactttgggaggccgaggtgggaggattgcttgagcccaacggtttgagaccagcttcagcaacataacgagaccccatctctctctattctatatataaatacactagttaaatttgaatttcagataaacaatgaataatcttttagtgtaagtatagccaaatgcatgggacatacttatactaaagaaagattattcattgtttatctcaatttttttttctttttcttttttttagagacagagcctccatctgtcacccaggctagagtgcagtggcgggaacacagatcgtggtaacttcaaactcctgggctccagtgatcctatagcgtcagcctcctaagtagctgggactacaggctcgtaccaccacacctaatttttttttttaagtttttgtaaagatatggtcttgctatgttgcccaggctggttttgaactcctggcctcaactgatccttccatctctgcctcccaaagcactgggattacaggcatgaaccactgcacccagcctgaaatttcatttaactggacatcccgtctacgggggatgtggaatgggaactgcccagataacatactagtctgggtgaatgttttgttgagaggaccctgtctcagagaaggtcagcatttgtctgcagctggcgtctctgccccagggaaggaagcgttgctagcgtcagggaggaatctcctcagctgccgagggcagtgggcaggattcagtgtccaaactctgatgatgtccaaattctgatgatgaccagaaacttccaacttgttgagtaacaaaaggcatgacattgggaaaatgtcatgaagtctgcaactcactttcaaataatttagcacaaactatacacgtatgcatatacgtgtatatagacacgtatttttattgtagacaaagtgtatatgtgtctatagacacgtatttgtattgtagacaaagtgaatatggcaaaatgttaacaattgcgatgggtttcattgtacacttctttcaactttttgctatgtttgaacattttttttctttctttctttttctttctttctttttttttttttttttgtgacatagtctcgctctgtcgcccaggctggagtgcagtggcacgatctcgggtcactgcaagctccacctcccgggttcacaccattctcttgcctcagcctctccgagtagctgggactacaggcgcccgccaccacgcccggctaatttattgtatttttagtagagacggggtttcaccctggtttcgatctcctgacctcgtgatccgcccgcctcggcctctcaaagtgctaggattacaagcgtgagccactgcacccagcctgaacgtttttttcataataaaaagtcaagctataatactgtttcattgggcagctccttttgtaaatttttttaaaggatctttttaatttttttttttttttttttttttgagacagagtcttgctctgtcgctcagcctggagtgcagtggtgcgatcttggctcactgcaccctccgcctcccgggttcaagcgattctcgtgcttcagcctcctgagtagctgggactacaggtacccaacactacgtctggctaatttttgtatttttagtagagacggggtttcaccatgttggccaggttggtcttgaactcctgacctcacgtgatccacccacctcggcctcccaaagtgtgctgggattacaggcatgagccaccgcaccaagccacctttcataatttttcttttttataattttagagatgggagtggtggtgtcttgctgtgttgcccaagctggtcttcaactcccagcctcaagcaatcctcctgcctcagcctccaaaagtgctgggattgcaggtgtcagccaccatgcctggctggacatctccttataaagcttgaatccgactacctctccctctgttctaatgtccaccatggctccctgctactctgaggatcatgtctatacttgttaaggtggctctgcaccacagacctgtcacatctaaagaagattatgacaaatgcgtgggcagtaacaataacattgtaaatttgatcctctccggaattacctacagtctccctgaactggttgttctttctctgacagcctccaagcctttctgctgtgccctctgcctggaaccccttccctttcctcattctccatcctcctatctttcttctcattggagtctccctgtaatttatttatttattacattttttattttttatttttatttttgagacagagtctcactctgttgcccaggctggagtgcagtggcaccatctcggatcactgcaactttcgcctcctggattcaagcaattctcctgcctcagcctcgcaagtagctgggaccacagctgtgcgccaccaggcctggctaatttttgtatttttagtagagacagggttttgccatattggtcaggctagtctcgaactcctgacctcaggtgatctgctcaccttggcctcccaaagtgctagatttacaggtgtgagccaccgtacctggccttacttttttaagagacagggtctacctgtattgccctggctggagtgcagtggtgcgatcatagctcactgcagcctcaaactctaggctccagttatcctcttaccatagcctcccaggtggctaggactacaggcatgagccaccgtgcccagctaggggtctctctttaaagccactttttcggggaagcatcctctgaccccggaacctcaccaaggtttccctcattgtatttccactttgtggcctagctttgtcctctgagcactactgcaattcgctattatatatttgttttttgattttttagacagagtctccctctgtcacccaggctggagggcagtggcacgatcttacctcactgcagcatctgcctcccagtttcaaacgattctcctgcctcagcctcccaagcagctgggattacaggcgcccaccaccacgcctggataatttttgtatttttagtagagacagggtttcactatgttgaccaggcttgtctcaaactcccgacctcaggtgatctgcccacctcggcctgccaaagtcctgggattacagggttaagccaccatgcccggccttgctattacatagttgattctgtcttttgcatctgttcctctcactcggctctaagctccctggggtggcatggaagccagcatgtggaagtgggcacccctgtctgtaccccctagttcccagtatatggactggcacacaggggctgctcattcactctagttagaatggatgcttcactttcagcgaacatgccccctcctccaggaagccctccctgcccctcctcacctcctcagatcatcctcaaagggcaggaaaagccatttctttggcatgtccttgaggaacaggtcctgctgctcctccgtggagtcctgggacacgtacaccagggccagctgagccgcccgcagtacatagaactcatctgtgagccgcacgaagaagtccttgaggatgggcacgaaggcctggcactgtggacaagccccagcaccaaagaacagcagcaccagccggttctccagcctgcgactgacctcagcctccgtatccagctcgtcctggtcgctattgttgcggatcaggatgcggccagagaacagggaggccatggtaacctgggttgggtgctggggacagcgcggcgtgtggtccccggtctgctgactggctcctctcccagaaatagaaatctttagaaaaccagcttaggacttcactaatctgcctaaaccttgacctgaggggcctctaagggcggggggcagggctctctgtgtggcccttctcaggagagagccgcaaacgcattaagaaaacacgtaacagatgggcacggtggctcacgcctgtgatcccagcactttgagaggcagaggtgggaggatcatctgaggtcaggagtttgagaccagcctggccaacatggtgaaaccctgtctgtactaaaaaataaaaaaattagccaggcgtggtggtgggcacctgtaatcccagctacttgggcagccgaggcaggagaatcgcttgaagccaggaggcggaggttgcagtgagctgagattgtgccactgcactccagcctgggcgacagagcgagactccatctcagaaaaaaaaagaaagaaagaaagaaaaaaaaccaaaaaaccatgtagcagacagtgactcacgcctgtaatctcagcactttgggaggctgaggcaggaggatcacctgagaccaggagtttgagagcagcttgggcaacagtgtgagaccccatctctatgaaaaaattaaaaacttagctgggcatggtgttgtcatgagcctgtagtcccagctactcagctgagatggaaggatcacttgagcctgggaggttgaggctacaatgactgcactactgcactccatcctgggtgacagagcaagacctagtgtctaaaaataaaaaataggctgggcacggtggctcacgcctgtaatcccaaagctttgggaggtcaaggtgggtggatcacctgaagtcaggagttcgagaccagtctggccaacatggagaaaccccatctctactaaaaatgcaaaaattggccaggtgtggtggctcacgcctgtaatcccagcactttgggaggctgaggcaggtggatcacaaggtcaggagatcgagaccatcctgactaacacagtgaaaccccgtctctactaaaagtacaaaaaaaattagccgggtgtggtggcgggcacctgtagtcccagctactcgggaggctgaggcaggagaatggcgtgaacccgggaggtggagcttgcagtgagccgagaccgcgccactgcactccagcctgggtgacagagtgagattccgtctcaaaaaaaaaaaaaaagcaaaaattagaccgggtgtggtggctcatgcctgtaatcccagcgctttgggaggctgaggcaggcggatcacctgaggtcaggagttcgaaaccagcctggccaacatggtgaaaccccatctctactgaaaatacaaaaattagcggctcgtgatggcacatgcctgtaatcccagctactcgggaggctaaggcaggagaactgcttgagcctgggaggcagaggttgcagtgagctgagattgcaccactgcactccatccagcctgggcaacagagcgagactacatctcaaaaaaaaaaaagcaaaaattagccaggcgtggtggtgcatgcctgtaatcccagctacttgggaggctgagggaggagaattgcttgaacccaagaggcggaggctgcagtgagacaagattgtcccactgcactccaacctgggggatagagtgagactctgtctccaaaataaaaataaaaaaatttaatatctgacttttttgtatgtatattttttgagactgggtctcactctgtcaaggtgcccaggctggagtgcagtggtgtgatcatggctcactgcagccttgacctccagggctcgggcgatccttctatttcagcgtccctgttagctggcactagagttctgtgccaccacgtctggctaattttttgtatttttagtagagatgaggttttgccatgttgcccaggctggcctccaagtcctgggctcaagcaatcctccagcctcggcctcccaaagtgctgggattacaggcatgagcatgcaactggccacaccttttcataaatatattaaatcacattgattcacatggactctactagttacttcaaggtctaagtcagggtgagcatctgtgatattttagggtgtctcctatgatcaggatgtgatatgaaattatctttgatttccacaggggacaaagttccagggctagccaatgtctgcattcacagtgagaggacctgatgaattccagttagaggctaatgaaatgggccgggcacagtggctcacacctgtaatcccagcaatttgggaggccgaggcgggaggatcacctaaagtcaggagttcaagaccagcctggccaacatataatgaaaccacatctccactaaaaaaatacaaaaattagctgggtgtggtagcgcactcctgtaatcctaggtactcaggaggctgaggcaggagaatcgcttaaacccgggaggcagaggttgcagtgagctgagatcacgccactgcactccagcctgggttacagagtcagactctgtctctaaaaaaacaaaacaaaacaaaatggggggactgggcgcggtggctcatgcctgtaatcccagcactttgggaggccaaggcaggcgcatcacgaggtcaggagatcgagaccatcctggctaacatggtgaaaccctgtctctactaaaaatacaaaaaaaaaatagccgggcatggtggcgggcacctgtagtcccagctactggggaggctgaggcaggagaatggcatgaacccgggaagcggagcttgcagtgagccaagatcgcgcctctgtactccaggctgggcgacagagtgagactccatctcaaatgaaaggaagaagaagaagaagaagaagaagaaggagaaggagaaggagaaggagaaggagaaggagaaggagaaggagaaggagaaggagaaggagaaggagaaggagaaggagaaggagaaggagaaggagaaggagaaggagaagaagaagaaaagaagaagaagaaaagaagaagaagaagaagaagaaagaagaagaagaaaatgtatttttttttctccatcctcctgaattctgtctggaccacccacaccttaagattgtagatgtgtaggtgtagaaggctgaaagtcatggatattatattttgcatctccaactccaaccctgtcaaagggtagagactagttctgcccccccttgaatccaggtaggtttcatgacttgctttgacgtatcaaatgtggtggaatgggctaagcgcggtggttcagcctgtaatcccagcacttttgcaggctgaggcaggcggatcacttgaggtcaggagttcgagaccagcctagacaacaatggtgaaaccctgtctctactaaaaatacaaaaattagctgggcatggtggcaggtgcctgtaatcccagctactcaggaggctgaggtgggagaattgcttgaattcgggaggcggagattgcagtgagctgcgatcgtgccattgcactccagcctgggagacagagcacgactccgtctcaaaaataaataaataaaatagaatgtggtgaaatgtgtgagtttcaaagatgtcttcattttattttatttttcagagacggggtctcaatctatcattcaggctgaagttcagtggtacaatcatagcttactgtagtcttgacctcctggactcatgggatcctcctgcctcagcctcctgagtagatgggactacaggtgcatgccagcatgcccgtctagttttaaatttttttgtagaggtcgggtctcactcttttgcccatgctgatctggaactcctggtcttaagcgatactcccgccttagcctctcaaagtgctgggattacagctgtaatgtgcctggcctgaagagtatctttagtttccttctgcctctcattttactcttgaaactctattgggaccccatgtaagaaagctgatctaggcagggcaaatttgctcatacctgtaatcccagcactttgggaagctgaggcgatcagatctcttgatcccaggagttcaagagtagcctgggcaacatagcaaaaccccctctacaaaaaaatacaaaaattatctgggcatggtggtgcacctgtagtcccagctacttgagggtgctgaggctggaggatgacttgagcctgggaggtcagggatgccgggaactgagatgatgcctctgtactccagcccccaggcaatagagtgagaccctgtctaaataaataaataaataaataaatgcaagcagatctaggtatggcacagtggctcatgctcatgcttgtaatcgcagcaatttggcaggccaaggcaggaagatagcttgaccccaggagttcaagaccagcctaggcaatgtggcaaaaccctgtctctacaaaaattagccaggtgtggtggcacacgcctgtggttccaggtactcgagaggctggggtgggagcctctccctcctgagcccaggaggtcaaggctgcagtgagctgggatcgtgccactgcactccaaccttggccacagactgagaccctgtctcaacaataaaaaggaaacaaggggcggggcgcggtagctcatgcctgtaatcccagcactttgggaggccaaggcaggtggatcatgaggtcaagagatcaagaccatcctggccaacatggtgaaaccctgtctctactaaaaatacaaaaattagctgggcatggtggcacatgcctgtagtcccagctacttgggaggctgaggcaggagaatcgcttgaacccggcaggaggaggttgcaatgagccaagatcacgccactgcactccagcctggcgacagagtgagactctgtctcaaaaaaaaagaaaaagaaagaaagaaaagaaagaaagagaaggaaggaaggagggaaggaagatagaaagacaaaagaaagaaagagagagagagaaagaaagaaagaaagaaagaaagaagctctagtccagggctctgtgcctcttgtctgtagaggactaggaggtaaacactttcatctttgaagtccatgtggcctctgttgagaaccatagctctcatctttcctccttctgtagtgggttgaactacaggctccccacaaaaagatatatccatgccttcgcccccggaacctgttaatgggaccttgtttggaaggagtctttgcaggtgttacttagttaaggatcttgagatgacatcatcctggattatctgagtgggccctaaatccaatgactgatgttgtaaacgggagcgtgaccgctgaagcacagcatcacaggggcacgtttaggcctctggatggctgcgggcgggcctgactaatgtcaggccttccacaagaggtggtggagcagagtcttctctaactcccctggggaaagggagactccctttccaggtcggctaagtaatgggtgccttcccaggcgctggcgttaccgctagaccagggagccctctagtggccctgttcgggcatgacagagggctcacacttgtcttctggtgacttctcactgtgtcccttcagctcctacctctgtatggcctggtttttcctaggttataattgtagaacagagattattttaatattggaataaagagtaatgctacaaactaacgaatgattaataatattcatatataatcatatctatattctatttcttgtataactattcttattctatatattttgtttattatactggaacagtttgtgccctcggtctcttgcctcggcacctgggtggcttgccgcccacagaggtgatcagtccaagactacctggctagaaacgagcagagagcagtttggcccggaagcctgagttttactccctggtccacatctcagtttcctggggataggacagtccccaatccctcatctgaaatccctggggacagctgtgtttgtgaattgggagattttgtattttaggaaaacaactgggggcagaggctgctgtatacccgtgctgttttagggggctcagaaaataatacccaggccgggctcagtggctcatgcctgtaatcccagcactttgggaggccgaggtgggggatcacttgaggtcaggagtttgagaccagcctggccaacatggcaaaaccccatctctactaaaaatacaaaaattagccaggcacggttgtgtgcatctgtaatcccagctactcgggaggctgaggcaggagaatctcttgaacccgggaggcaaaagtcgcagtgagctgagattgggcaactgcactccagcctgggtgacagagcaagactccgactgaaaaaaagaaagagagagagaaagagagagagagagagagagagagagagagagagagagagagacagacagacagacagaaagaaagaaagaaagaaaaaaaacaccccaaaatgaagatctcagaagcaaaagtttttctctgaccttctcctgccctcttgtgtctcagatctattctcccccaaggctggccataaaaactagaatccctctttcccaaggtaggttttagaaactagaactcttggctgggtgtggtgcctcacgtctgtaatcccagcactttgggaggccaaggcaggcggatcgcttgagatcagaagttcgtgaccagcctggtcaacatggtgaaaccctgtctctaccaaaaatacataattagctaggcttggtggcatgcgcctgtaatcccagctcctggggaggctgaggcaggaatcgcgtggacccaggaggcggaggttgcagtgagccaagattgagacattgcactccagcctgtgtgacagagtaagattccatctcaaaacaaacaaacaaactggtaagatggagggggaaaagggaggataggaaaaaaggaaggggggaagagaggaggagggcagggaggaggagagaaaagggcagaaaggagagaaggagggagaaagagagaaggaggaagtggggtaagagaagagagaatcagagcacaagaaaggtggaggggaagtttagagaagaaaaaggaggaggaggggtaagaagagaggaaggaggagggaaaggaggagaggaggggaggagggacagggaacactcagctgacatttatgaatgaatgaatctcaattccaagtaagcatgacagctccagtcctcagtttctttcttccttctttctttgtttctttcttttctttctttctttctctcttctatttttttttttttaagacagggtcttgctttgtcacccaggctggagtatagtgacgcgatctcggctcactggatcctctgccttccgggttcaagtgattctgctccctcagcctccggagtagctgggattacaggtgtgctccaccatgcctgactaatttttgtatttttagtagagacggggtttcgtcatgttggtcaggctggtttcgaacttctggcctcaagtgatccacccaactcggcctcccaaaatgctgggattacaggcgtgagtcaccacgcccagcctgccctcagtttctttacctgtcaaatggggtgatcacagcggtgctacctggctaggtaagagtgcaactgcagttactggtcattgctgactcttccaggcccagaaagcagcaggccagtggctggctctgggcctgtcctccggatcttcctcgtgatccctcattccagccaccctgctgcccgcagggaccaatggcagcgtagggggtgagtgcctgcccagccctgtcctccaaatgcattggaatcaggcccgggccgcctcctaaggagaacgctggaaaggtcggccaaggagagcagaaaacaagcagtggtggagtcggcagtggggcagaggagggggagctggaagggaaggaccccaaagcagaagcccgcacagtaggcacagcgcacccaagaagggtccaggagtctgcagaaacagaaaggtccccggcctcagcctcctagtccctgcctgcctcctgcctgagcttctgggagactgaaggcacggcttgcagcttcaggtcagccagagaatggggttgtgcgtgcccccaggccagcgctggcagcgcctgggggagcatctaggaccccggggtgcaagtaaagggcctgtaggtgcttctaggaaggatggggacctggcgtgtggattttgtcctccctgggatcctggggtgtgacggtgagacttaaccgacaaggcttcgggacatggattaagaattagctgtgtccttgaatcacacgtgttaagaccgcggcggtgtttacagttagagacttctgaggccccaatggtgtgagttgagcactcccccgggccctggaacgtgtttttaagaccgaaagaggctttggggcttggatttaggacaagctggagcaagaatacagcccgcgcgggccgtgggtgtggactgggatatttttggtcccccggggtagagatcctgcacgccaactagggctcgggtcctgatatcttgcgagccacgccccaaggctgcaggacacgtgtgtttcctaaaaggagagggggtggggcaaggcttggttgtcatggagacagcggacgaccctggcgggccgttctagcacccatgtctctttggccgtcgcctctccggtccggttgcctctctatggtcgtggcttctggaagacggccggcctcggctctgcgggctgaggggcttcgaagtagacaggagggaagaggggcggggcctaggtcctaggggggccggagtgaaacccaggaggtggcgaccgagccaaagcctgagggcggggcccgtggccaggatagaacctgagcctgggaacttgggctaggcccggaactggggtggggcttgaacggattggggagggctctagtttcgggagggtggggcgtgtgcttattgcgggggggtggggaggcatatgtctaacctagggggtggggcctggctgagaggggcgggactcggggagagggcttgtacctgtgggctgggctagaagcataacctaagggcggggcccagtgagtggtgaaaaggccacggggtagaggcaggaccaggaggaaaggggacaggacgtgaagggtaattcggggatcgaggatagaggctagatgaaggcatgtggcgaggcctgacagtgaccgacaaggtggacatgctggctctgggggcggggactgttgtaagattggcagggaaggatgggctcaaaaatatggaatagagcggacccagggtccgggggcggagcctggccaggacctggccaatcccaggcctggggccctggtctggttcctagttagcgggcgggtgtaaaagcctggaaaggggcgatgcctggcctgaggagttgaccaatcccaggcctgggggcggagtctgactcggagcgcgttcccggactcgcggggggcgcagagccgaggcctgggggcgcggctcgctgtagaggcgggggcggtcgtggggcggagcgggtcgtggggcggggctggagcggcccgcggcctcagctctctctgcttccccaggatgcgggctccgggtgcgggcgcggcctcggtggtctcgctggcgctgttgtggctgctggggctgccgtggacctggagcgcggcagcggcgctcggcgtgtacgtgggcagcggcggctggcgcttcctgcgcatcgtctgcaagaccgcgaggcgagacctcttgtgagtgttgccgggatccgtccagggctgggggcggggctgagggctctgggggcgcacggtgcagggctgggttgcggggacggcttggagggtccggagagctgagggtgctttgtaggttgggggcggggctgggccgagggctgggcgggggcggggcctgagagggtgaccagttgggggtctctgagggggctacaggggacactttaaggatttctcgaggaagatgagtagcctctaaggtgcttcgggcgttgcaggctgcttaggagatgatctcaggggatttggggggcaatttgggggtctttgggcaactggtggaaattccagggagctggggctgactggaaatccgtggcggtgtgggggtctttttggagccgtgataactgtgagagacttcagggggctctccagtaggtcaccggggctcacagggacgacccaatagatagtctctggggggttgccaagacactttgggtctatctagggctttctctgagggatgagcgagctgctctataaaggacttcccgggtttctgaaggtgtgagtttcctcgggatcgtttacagctggggcactgtttgagattttggggtctgtgtgggactttgggtttgggagttgttcggagtgtgtcgggaggctgctgtgtattccaggacttgtttggggggtctcttctggagactgggacactggattcatgctaggggggcagattctggtgtcctgtgcaaggatccttggagggtttttgcggtgtctctgagggacttgctcaaacgagccgttgggggtccttctgggatgaaacaggcattgctgggggcttctatcagagcagacctcaggaacagcaccacgtgggagcaggtgagcgccggctagcggggcagggctcaacaccttcacagctccttgtaagatggagtagcaagagggactgaacccattgtaaggagggcacagagggtgtggagatgggaaagatcccaccgtaagttgactggttctgaactttctaaaactcaccccttctgcatgccatggccccctgcccccggctccttggttgttctgatgtggaaatctgactgtgccctctgctcagacaccttccatggccagcccatccttggcagaaggaagactcagcccctagctgggcactcaaggtcctaccatctgttccctgcccacctgccactccccccatccatatgttcacctggtcttcagaaagacttgcagtgtcaagctcaagctgcccagaacatactggaccccttttagccagggcaggctctccctctgggaacctttgctgaattttcctgctcagcaccctcccatagctccttgttgcccttagaattgacgccatactggccgggagcggtggctcacgcctgtaatcccagcactttgggaggccgaggcaggcagatcacgaggtcaggagatcaaaaccatcctggctaacacggtgaaaccccgtttctaataaaaatacaaaaaaattagccaggcgtggtggtggacgcctgtagtcccagctactcgggaggctgaggcaggagaatggtgtgaaccccggaggcggagcttgcagtgagcggagatcatgccactgcagtccagcttgggcgacagagtgagactccgtctcaaaaaaaaaaaaaaaaatagaattagaattgaggccatactcctgagcattgcgcacgaggtccctgaccatgtcccagcctccgcttacttcccttttgtcgcctagctgcacttaccttttgtctattgctcatttgtttgtttgtttgaggcagagtctcactccgtcgcccaggctggagtgcagtggtgcgatcttggctcactgcaacctctgcctcccaggttcaagtgattctcctgcgtcagcctcccaagtagctgggactacaggcacgtgccaccatgcccagctaatttttgtaattttagtagagatggggtttcaccgtattaaccaggctggtctcaaactcctgacatcacgtagtccgcctgccttggcctcctaaagtgctgggattacaggcatgagccaccatgcctggctcccttttttttgagacagggtgtcttctctgttgcccagggtggaccagcctccatctcctgggctcaagcaatcctcccacctcagcctcctgactagctgggactacaaacgcctgcctccgctcctggatagttaatagaatgttttttatagagatgaggtctcgctatattgcccagtctggtctggaactcctggctttaagcgatcctcctacctcagcctcccaagtggctgggatgacaggtgcacaccaccacacctggctaatttttttattttttgtagagacgtggttctgccacgttgcccaggctagtctcgaactcctggcctccagcgatcacccaatttcagcctcccaaagtgctgggattaccgcgcccagcgtgaactgctttgaaccatattgtctacttgactttcagacagccagatggtgcagttggagttgcaaactcatgtgaggttatgagtcatcgatcgagatttcaccccttcctcctaacagcaaggtctgagataccaaatttccttttagctcctggtgtgtgtatgttaaggaaagatcttattttgatttccaattcacctttatgttgaatgggcatgctttgaggtcttatcagactcaaacctgcttgtctgacacctaagctgtccccctcctggggctacaatgacattttggcctctggttggtccttattttctgatcaccttgttgctacattaataaaaaattaactcggctgggcgcggtggctcacacctgtaatcccagcactttgggaggccgaagcgggtggatcacctgaggtcaggagtttgagaccagcctggccaacgtggcgaagccttgtctctactgaaaatacaaaaattagccgggcgtggtggtgcacgcctgtaatctcagctacttgggagtctgaggcaagacaatcacttgaacctgggaggtggaggttgcagtgagccaagatcgtgccattacactccagactgggcaacatgagcgaaactccatctcaaaaaacaaaacaaaacaaaacaaagatttaactcatttaacccagcatttttagttgttttctttctttgctttgggattagaagtttcttgtttttttgataaagtctcactctgtcacccaggctggagtgcagtggtgtgatcatagctcactgtagcctcaacttcctgggctcaaatgatcctcccatcacagcctcccaagtagctgggactacagatgcgtgccacaacagccagcagattttgtttattttttataaaggagaggtctcactatgttgtccaggctggtcttgaactcctgaggtcaagagatcctcctgcctcagcctcccaaagtgctaggattataggtgtgaaccaccacatctggcctgttttcttgccttttaatcttgggcctctttctagactgtgggccctataggggcacaaaaggagactgtgtcagtcttggtgccactgtggccctgcgccccactcaggattggcgcacagcggtagcgcaggacatgtttgttaggtggaaggccatcccttccttcttgggttcacccaggcccatctctccctcctctccagctctgctcccatgggccctgtgggtgtccatgcctggttctaagttcctgacatggcttgacatacttgcctgtgggtggcagctttgaagatggccccagggatccctgtctcctgctcttcccacttgtatggtcccctccctttgagtgtgggctggacctagtgacccctttcttttttttttttttttttttgagatgggagtttcgctttgtcacccaggctggagtgcaatggcgcgatctcggctcaccgcaacctccgcctcccaggttcaagttattttcctgccttagcctcctgagtagctgggattaccggcatgcaccaccacgcccagctaattttgtatttttagtagagacggggtttctccatgttggccaggctggtcttgaactcccgacctcaggtgatctgcccgcctgggcctcccaaagtgctgggattacaggtgtgagccactgcgccctgttttttttttgagacggagtcttgctctgccacccgggctggagtgcagtggtgtgactccactgcaccctccagctcccaggttcaagcaattctcctgtctcagcctcccgagtagctgggattacaggtgcctgccaccacacccggataatttttgtatttttagttgagagggggtttcaccacattggccaggctggtctcaaggtcctaacctcaggtcatccgcctgccttggcctcccagaatgctggtattacaggctgaaccactgcgcccagccctagtgactcccttctaatgagtaaaatacatcagaattgatggaggctgggtgcagaggctcgtgcatataattccagcactttgggagcccaagatgggaggattgcctgaggccaggagttcaagaccagcctgagcaacatgatgagactccatctctacacgcaaaaaattagctgggggagtggggctctcctgtggtcccagctactcaggaggctgagtgggaggattgcttgagtccaggaggtcaaggctgcagtgagccatgattgccccactgcactccagcctgggtgagggagcaagactctgtcttgaaaaatgaaggggtgctgacaaatcccatttaacacgtgagagaacagaggcacagagaggggaggttatttgcccagaaacacacagccggggaggcacaggactccagagcatgtgctcttagccactgtgccgcactggagtggttggggtgctaaatttagaccttggcttcagaaaatatttcagcaccctgccctgactctcctaacatgccctgtacttcctgcatgaaatctgatcgtattcatccttgttgatttcttccgccctggagtcctgggcccagagctggacagtgggctcattgtccccaggctgggggtggcttgagcagctgccaggcagggctgcctaggcatgtggctggaaccaagtacaggaatccactgcctgctggtgtgggcatccttgagagagaacgagtgagaccaagagaccgggaggctgggggtgaatcctcgtgttcccacatctagctctggtgtttagcctgacggtgaccaactgtggcctcagttcctgtttcttgttgttgtgttgcctctggacgggcaccctactggcaggggctgtttcctgtggttactccctcaataacagccctctccccatggatgtaacatttgtaccccatcatggagttcttggggtgctccgtcaaattcacccacaggaagcccttagagcagaattgggtgtatactaggtgctccaggctgggcatggtggctcatgcctgtaatcccagcactttgggaggctgaggcgggctgatcacctgaggtcaggagttcgagactagcctggccaacgtggcgaaaccctgtctctactaaaaatacaaaaaaattagctgggcgtggtagcgggcacctgtaatcccagctactcgggatgctgaggcaggagaatcgtttgaacccgggaggcagaggttgcagtgagctgaggtggcaccactgcactccagcctgggtgacagagtgagactctgtctcaaaaaaaaaaaaaaaaaggaaaaaaaaagacgcaggcattgggcacctgctgtgtgcctcatgggcacttggcctgccactggctacgtcgccagcacttgataaatgctttgtaataagtctgccagggattagagggaccctgggaggaggctttgtttctgggttgttctgtcctcaaattgctctgtgaccttgggcgtgtccattccccactccgagcccccagttcattcattatttgacaaatggggatctgagggacctattttggagggtggatataaggttagcacagggcatggcagatagtaggtgcttaataaacactgagaatgatcatctgtttttttttttttttttttttttgagacatggtctcacactgtcacccaggctggagtgcagtggtgcaatcttggctcactgcaaccttcacctcccgggttcaaacaattcttatggctcagcctcccaagtagctgggactataggtgcccaccaccacacctggctaatttttgtatttttagtagagacggggttttgccatgttggccaggctggtctcgaactcctggcctcaagtgatccacccaccttggcctaccaaagtgctgggattacaagtgtgagctactatgtctagctgagaatgattatcttggctgctctgtttattggttgaatggatgagcagcgcttttttttttttttttttttttttgagactgaatcttgctcgattgcccaggctggagtgcagtggtgtgatctcagctcactgcaacctccacctcatgggttcattctcctgcctcagccttctgagtagctgggattacaggtgtgcaccaccatgcctggctactttttttgtatttgtagtagagacagggtttcatcatgttgaccagggtggtctcaaactcctgacctcaggtgatccacccaccttggcctcccaaagagctgggattacaggcatgacccaccgtgcctggccttctttctttctttctttctttttttgagacagggtctcactctcattgcccaggctggagtgcagtggtgcaatcttggctcactgcaacctccacctcctgagttcaagcaagtctcttgcctcagcctcccgagtagctgggattacaggtgcccgccaccatgcccggctaatttttttgtatttttagtagagacggggtttcaccatgttgggcaggctggtcttgaactcctgccctcaggtgatccacccacctcagcctcccaaagtgctgggattacaggtgtgagccaccgcacctgccgcccacctttttctaaaataaatttaaaaaattattttaacatagagatgaggtctcactatattgcccaggctggcctcgaactcctggcctcaaatagtccccctgtcttggcctcccagagtgctggaattacaggagtgagcccctacacctggccctgaagtgttgacattgaactcaactagcagcactaaaacccacgcctgaagaaagctgctgtaacacacatattttctccatgaggcacatcacaccagacaagcgcctcagccctgtgcttgggggtcattttcaacagcgaagtcaccagcaaaaatcacaaaaatgcagctgggcgcggtggctcatgcctgtaatcccagcactttgggaggctgaggcaggcggatcacctgaggtcaggagtttgagaccagcctggccaacatgatgaaaccccatctctactaaaaatacaaaaattagccaggtgtggtggcaggcacctgtggtcccagctactcaggaggctgaggcaggaaaatcgcttgaacctgggaggcggagtctgcagtgagccaagattgtgccattgcactccagcctgggcgacagagcaagactccgtctcaaaaaaaaaaaaaaaaaaaaggcacaaaaatgcaaaaaacatggcactaaatagactgtgaaaagggtgcttgtttacaatgtgagagctgaattaaggaggcagagtgggccagatgcggtagctcacgcctgtaatcccagcactttgggagtctgaggtgggaggatggcttgagcccaggagtttgagaccagcctgggcaacatggcgaaaccccatctctacaaaaatacaaaaattagccaggtgtggtggtgtacgcctgtagtcccagctactcagggggctgaggtgggaggattgcttgagcccaggaggcagaggttgcagtgagcggaggttgcagtgagccgagattgtgccactgcactccaccctgggcaactgagtgagaccctgtctcaaaaaaaagaaggcagagtgttgtcttgatgacttcagatgggaacatgcatgttggcaattctgatttttcacctctccacatgtgtttgagtatggcggtgaatggcagctactcaggaggctgaggcaggaggatcacttgagccctggagtttgaggccgtagtgagttataatggtgccaccgcactccagactaggcaacagagtgagaccctgtctctaaacaataaaaaatttaaaaaattatcagctgggaacagtactcacgcctggaatcctagtactttgggaggccgaggcaggcggatcacctgaggccagaagttcaagaccagcctggccaacaaaatgagatcccttctctacaaaaaaataaaacaaaacaaaacaaacccacaaaaatccctttactggcaattttggagatgcagggaggcacaaaggcctgtcagtgtctttgtactggatttgctgtctttgtcatgaaatcactgaattttcccacttggtttgagccccgttagtcatcagcctgcagcggggggccccattcttgtgcaggctgcccagttttctgttgtaaagacaatccattgtataggtcatccctcccctgcttagggcgtttggtgtttttctgatcttctgcactttggaagctacaatgaatagcactgttatttcccatatgcgaatttaatatgccaaactttttattttttaaatttttgagacatacttcatattctattgttgtttctttctccctctctctctcaatttttttaagatgagtcttgctctgtggctcagctggagtgcagtggtgcaatctaggctcgctgcaacctctgcctcccacattcaagtgattcttgtgcctcacacttttgagtagccgggattacagggacccaccaccacgcacggctaatttttgtatctttagtagagacggagttttgccatgttggccaggctggtctcaaactcctggcctcaagtgatctgcccaccttggcctcacaaagtgctgggattacaggcgtgagcccctgtgcccagcctggtctgctctttggaagctacagtgaatagcactgtcatttcccccattcgactttaagatgccaaattttttatctttcgatacaaaaaaatttttttttgagacggagtctcactctgtcacccaggctggagtgcagtggcatgatctcagctcactgcaacctccacctcccaggttccagtgattctcctgccacagcctcccaagtagctgggactgcaggaatgtgccaccatatccggctaatttttgtatttttagtagagacggggtttcaccatgttggccgggctggtctcgaactcctgacctcaagtgatctgctcacctcggcctcccaaagtgcacagattacagacatgagccactacacctggcctattttttaaaaatttttgagacatatatttctattgtcatttctttctcttttttttttcatgaagaagttttactctgtcacccaggctcaattgcagtggcattatcatggctcactgcaaccctgacctcctaggcccaagcgatcctcctgtctcatcctcctgagtagctgggactatacatgccacaatggccagttaatttttttctttttttttttttttttgcagagatgaggtctcagtttgttgcccaggctggtttcaaactcctgagctcaagtgatcctcccaccttgacctttcaaagtcctagcattataggcgtgagccaccgtgtccacccaatttttttaaaaattttaattttaggctgcaggttgcacgtgctggtttgttgcattggtatattgtatgatgctgaggtttgggcttgtaatcatcccattgtccaggtagtgaacagaatagaatatccaataggttattttcagctgccccttatggagttcccagtgtctgttgttcccatctttgcgtccgtgcgtattcaatgtttagctcccacttataacgaaaacgtggtatttggatttcttttttttttttttgagatggagttttgctcttgttgcccagcctggagtgcaatgacgcgatctcggctcaccgcaacctctgcctcccgggttcaagcaattctcctgcttcagcctcccaagtggttgggattacaggcatgcgccaccacgcccggccaattttgtaattttagttgagacagggtttctccatgttggccaggctggtctcgaactcccaacctcaggtgatccatccacctcagcctcccaaagtactgggattacaggcgtgagccactgggcccggcggtgtttggatttctgtttttgccttaatttgctcagggtcatggcctccagctgcatccacgttgctccaaagcacatggtttagttcctttttttttttttttttttttgagacagagtctcaatctgtcacccaggctggagtgcagtggcgcaatctcggctcactgcaacctctgcctcctgggtccaagtgattctcctgcctcagcctcctgagtagctgggattacaggctcatgccaccacacctggcctccatttacattttttaaaaatgattttaaaaaatttctgagatagggtctcactcccataacctaggctggagtgcagtgacacaatctcggttcactgcagccttgacttcctgggctcaagcgatcctcctgcttcagccttctgagtagttgggactacaggcttgcgccactaccctggctaatttctgtatttttagtagagctggggtttcaccatgttgcccaggctggtctcgaactgctgggctcaagcaatcctcccacctcagccttccttccaaagtgctgggattacaggcatgagccagcatgcctgcacggctgattgacattttttgaagttctctccttaaggagggaactctccagttggagatgttaatttatcagcagcccatgagccacccagagagcagcaggacaggtccctgcagggagacctggtgggccagaacctgcccggggccccttagatcgggctggggccacgggtggctgctctctccctaggcctgcaggattggaacctgatctgagagtcccagatgcctctcttccttcgagattatttgtagcaagctctctgtgctccaggagagctgggtcttgggcggtctcctcccctgctgcctctctggtactagaatgtaacagatgcatgccctgtctacccagtatagggagggacagaccaaggacacggtggtaaatgagtacattgcacgtggcgtttaaagactagaagtgcccgccgggcgcagtggctaacgcctgtaatcccagcactttgccggggtgaggcaggcggatcacctgaggtcaggagcttgagaccagcctggccaacatgacgaaactccgtctctactaaaaatacaaaaatggccaggtgtggtggctcatgcctgtaatcccaccactttgggaggccgaggcgggtggatcacgaggtcaagaaatggagaccattctggctaacatggtgaaaccccgtctctactaaaaatacaaaaattagctgggcgtggtagcatgtgcctgtagtcccagctacttgggaggctgaggcaggagaattgctggaacccaggaggcaaatgtttcagtgagccgagatagcaccactgcactctggcctggacgacagagcaagactctgtctcaaaaaaaaaaaaaaaaaaaaaaaagggtggggagagaatggagcgggaggagggtctgtatcaccacagggtcttggctagtgtgggctttgcactcagtaggtgctcaccatttcaagaatcagagttcatgcttctgcaactggctgctagggagggcagatgccctaggtactggacccaggggcatgaaatgaacattggtccaccctctattgactgagcacatactccagcagatgcatagatgctagagatgcacagatgctagagatgcacagatgcacagatctcctgcgtgctcacaatgccaatgaatgatggagggaatgaatgaatgagggaatgagtgaaggagggaatgaatgaatgagggaatgagtgaaggagggaatgaatgagggaacgagtgaaggagggaatgaatgaatgagggaaggagggaatgaatgaatgagggaatgagggaatgaatgaacaaaggagggaatgaatgagtgaaatgagtgaatgaatgagggagaaatagacccatgacctggtggctctgcacaaggctttgatggggagagtgaaggtgacagggagggctcccagggtagaacagagagctccctgacaccagccagtgccccactgaccaagtgcggccccattttgagggagctgtgattggggagcagtaagcatggtgcatgggccatgtggtgcctggaaggtttcctgagggaggcaatgaggctgctggggggagctctgtgagtgggtgtgtgtgtgggggctgtgctcagctcagtgagcttgtgggtcatggtgggtagggaagtattgtcactaggagttcagcagcctgctcatatcccaaaagtagccagaggggccttctaggggcttccagggtaagtggtttgacccatgcaggaagtctcatgaaaaccctggacctttgtttttagaaattgcggatgctctcccccaacagaccccggcaccctcctatctccatggctttcattgtgaacccctcctggggcccatgagcctcatggagccggcccctgcccacctcagacttcattcccctttcatgtcgctttcccctaattccccccacactgacctccacgctggtcctcaactgtgccccattcccaggcctgttcccaccccagggcctttgcactggctgcattccggatgtacccacagcgactcccttttgcctcaccaggtcctgctcagatgccgcctgcctctctcaagggcctcccctgcctctgcccttggtccgtgtgactgaccacatcaccccttgcagtcttgtcaccatccagcacggcctggtattcagtcatatacatggaaggggtctctcttcccagaggactgtgaaccccagagggtggggcctggtggtctggatgctctgtccccagagctgagaacagtgcctaaagcacaacagacactggtatgcaccagctgcctgaatgaatgaaggaaggagggaatgaatgaatgaaagagggagtaaatgataaatggagggaaagaataaaggagggaatgaatgatggagggaataaatgcatgaaagaggtaataaatgaacaaaggagggaatgaaagagtgaaggagataataaataaggatggaatgagaccagatgcggtggcccacgcctgtaatcccagcacattgggaggccaagggaggaccacctgagtccagtagttcgagaccagcctggccaacatggtgaaaccctgtctctacaaaaaatacaaaaattttgctggccctggtgacgtgcacctgtagtctcagctactagggaggctgaggtgggaggattgcttgagcctgggaggtctgcagtaagccatgatcatggactctagtctgggcgacagagtgagaccctgtctcaaaaaaaaagtactgaatgagtgaaggggggaaagaatgaatgacggagggagggaaagagtgagtgaagtagggaatgagtgaatgaagatggaatgaatgatggaatgaatgaaggagagaatgagggagggaatgaaagagggaaagaacgaagaagagcatgaatgaatgaccgagaggatgaatgaatataggtgctgaagtccactgtgaacattttggggggtgtgagcagccattgcagggatctggggaggcctgggaaaggcaggggagatccaaaggatggatttggtgattttgatgcagaagctggagggaggcagtggccgggccaggctgaaacaggggcaggtgggtggagcccctgccctgtgttggtcagggctgggcagggccaggtactacaacaaacacaccccacattccagtggcttaccccagtacaaggttattggttcccagagccaggggcgcagggtggtggggcagggagccaggaaggggtggggaccactcatttctccagcttctcaaccaagaaaatctgaatttccagcttctgtgatctaaacttttcctttcctttccatttcctttttgtttccttttttttttttttttttgatggagtcttgctctttggcccaggctggagtgaatttgcgtgatctcggctcactgcaacctctgcctgctgtgtttaagcaattctcctgcctcagcctccggagtagctgggattacaggcgcccaccatcacgcctggctaatttttgtatttttagtagagacggggtttcaccgtgttagccaggatggtctcaatctgctgacctcatgatccacccgcctcggcctcccaaagtgctaggattacaggtgtgagccaccacgcctggcctaaagcatttcttgtttgtttgtttgtttgtttgtttgtttgtttttaaagttcattcttggctgggcatggtggctcacacctgtaattccaatactttgggaggccagggctggtggattacctgaggtcaggagtttgagaccagcctgaccaatatgatgaaaccccgtctctactaaaaatacaaaaattagtcgggtgtggtggtgggcacctgtaatcccagctactgtggaggctgaggcaggagaattgcttaaacccaggaggcggagggtgagccgagattgcaccactgtactctggcctgggcgacagagtgagactccgtctcaaaaaaaaaacaaaaaaacagttcattctcattcatctaacagcaagtggtggcccgcctgcctccacacaatcattcaggaacccggctcctttcactgggggctctgcagttccctggggcctctgcccgttatatctactagcgagtggggaaggggaacttggaaccctccatctgggcttggcattggtccttacaccccccatccactggcacatctcctggccctacctggggcaggggcaatccctccccagttgggggcacacgtgctagatgcttcagccatctgtccctggtgccacccagtgacctgggggcagaacagctgcccagctcggggctggaccctgggggtcctggttagggtggtctgagcatgaagagtccaggctggaggtgctgggggatggtgtcaggtgctccagacgtcgcaggggacagaaaggaggatgggttcaggccccagctcccccagggccaccaagccagctggggtatgggggaggacagggtgactggtttattacgctttgagaatctaccttcttcctggctggttggtaaatggcccttgcccttggtccactgagagatccagccaccaaaagtttcaccatagacctcatcaaagcccctggctgccctggggtcctccagcggggaggctgaggctcccagaggccaggcggggcagggcaccagtgacgctgtcccctccgtcctccctcccagcggtctctctgtgctgatccgcgtgcgcctggagctgcggcggcaccagcgtgccggccacaccatcccgcgcatctttcaggcggtagtgcagcgacagcccgagcgcctggcgctggtggatgccgggaccggcgagtgctggacctttgcgcagctggacgcctactccaatgcggtagccaacctcttccgccagctgggcttcgcgccgggcgacgtggtggccatcttcctggagggccggccggagttcgtggggctgtggctgggcctggccaaggcgggcatggaggccgcgctgctcaacgtgaacctgcggcgcgagcccctggccttctgcctgggcacctcgggcgctaaggccctgatctttggaggagaaatggtggcgggtgaggccaggcgtgggcatcaggtgggcggggacccaggactggcccctgggcgggcggggagatgctgcgccccaggcctcggaaggcggccgccctggacgtgggcatgaggtgcacggtctgggtatgccccgggcagggagttggtgcatcccaggcctcgggagggggcctgtccggcggtgaccatgacccatgtgttggggaccacagcggtggccgaagtgagcgggcatctggggaaaagtttgatcaagttctgctctggagacttggggcccgagggcatcttgccggacacccacctcctggacccgctgctgaaggaggcctctactgcccccttggcacagatccccagcaagggcatggacggtgagtcaagggtgggacccctgctctatcaactggtttcctacccgcccaggccccgcccccaacttccaggccccaccccccaatgctcaggccccacccctaacacctgtatctcctgcagatcgtcttttctacatctacacgtcggggaccaccgggctgcccaaggctgccattgtcgtgcacagcaggtgaggggcccacaggcataatgccctcagccgctgagagtgacccaggctatcttgccagcctgacctgcccctcagctcctgtgggcatctccatgttaccctggggacagagagggcagctggtgtttcctgagcacttgctctgtgtccagaccagggccaagccctccacgtgtaaactcattgcaaccctcataactgcttggggctggacaaaggcatcacacccattttcacacccatcttgggacccggttgccctgtgcccactactctggggcccctctcatccccccacctgttcaccacatccatcccaccagcaaaacccgtcctctccatctgtctacttttttccatgccccccatctggacctgtgccagcccctcctcgggctcctcctgctccccccactctctcctccacccacgatggcccagctcctgtcagcagctacaggaggtttgaaaatcctaaatcagacctcccctgtcccagacctccctgcatctaccgtgaccctcagaataaaaccctctctcgggctaggcgtggtggcttacgcctgtaaccccaacactttgggaggctgaggcaggcgggtcacttgacgtcaggagttcgagaccgtcctggccaacgtggcgaaaccctgtctctactaaaaatacaaaaattagctgggcgtggtggcacatgactgtaatcccagctactcgggaggctgaggcaggagaatcgcttgaacccagaggcggaggttgcagtgagctgagatcccgccactgcactccagcctggatgatacagcaagactccctctcaaaaaaagaaacaaataacaaacaaaaaccctctctcagtttgggtggcttctgccacttccctgatgtcattttcctccccttcaccccgtactcactcctcctcagccccccaaactcttcaaacccatacactccttccggcctcagggccctcacatgtgctgtgcctgggcactcttccatagctcgcccccacagctctttcttgctaggtctcggatcacacttcacctccctagacaggatcccccaacccccctggctgcattaccatcagcccctctatgccccttgaccctattatatccctcgtgacacctaacaccaccaacaattgttggttgcgtgtttccttcctgccagcctgtgaactcatgcgaactgggctggctttgcctgggtccacatgcagcatgcttccccatgcctgtaccctgggggatttaggtcccagcctctgccctcccggctccccctccccctgcaggtactaccgcatggcagccttcggccaccacgcctaccgcatgcaggcggctgacgtgctctatgactgcctgcccctgtaccactcggcaggtactacggcctgggtagggaatggtgggtgggggcgggggaccccttaccaaggccaccctctgcaggaaacatcatcggcgtggggcagtgtctcatctatgggctgacagtcgtcctccgcaagaaattctcggccagccgcttctgggacgactgcatcaagtacaactgcacggtcaggccctgccctgttctgtctagaccccgcccctcccagccaggcctcaccccctcccaatcaggccccacctcctcccggtgaggccccgtacctcccagcaaagccccacctcctcctggtcaggtcccgtcctctcccagccaggccccgccccccgaccaggctctattcccttaactcccttatgtgcgccctcctgtccacctgctggcgcaacctgctcccccgtctctaggggtggggtggggagcggggcttaaggaatggctgttcaggatggggacagagagggcaagtagtgtttcctgagtacctgctctgtgtccagaccagagctaaaccctccacgtgtaaactcaatgcaatcctataactttggagggtggacccattttgcagctggggaaactaaggcttgtaatgcggctaggattgggcccagggtgcctgagctccttaaggcaatgccttccccatgccttgtgccctgtgggtcttccctgctgctgactgtagggaattgagaccctgggatgggaagggcgatgagtctggggcttccaggtgaggaacgcgtgaggcggaggtggaggcatctgctgtcccggagaggagagcaggcagaggttaagaacaggaattcttctttcccctccacagtgagaggagaccaggctgagggtttcagtgctgtaatgtggggcaggatacaggaaatacaggcgggaggtacaggaaacaggtatggagcccggagggaatagcaaggctgactgggaaggattgggtgagaggttgtccagggactgtggcaagttggcagatgcagattggacagatggggcccagagagattcaggccaggtcacacagctgagcaggggttgggggctctgggctgagcatcttggggtataccacaaggtccacagctgtgcttggcttcgcttttgaggagttttggttctgtttggagggtcttgggaaaattactaatctgcatgttgaaatgcaaaagtatatttttattattattattattttttgagacaggatctcactctgttgcccagactggagtgcagtggcgctatcatggctcactgcagctttgacctcctgggctcaagtgatcttccagcattggcctcccaagtagctgggactacaggtgcgcaccaccacgcctggcccacttttgaattttttttgtagagaagaggtttcgccatgttgcccaggctggtctcaaactcctgggttcaagcaatccacccacctcggactcccaaagtgctgggattacaggcatgagccactgtacccagcccaaaattatcttttaaaaaaaattacagagagtagcaaatacacataaaagtggacagaaaagtatagagagttctggtgcacccctcagctggacccagaggctatcagataccctgtcctgcccctccccacctccccacatcctcccctcggtgatggcataaagcatccctcagacggcatcatgtttcctgtgtagctgtttcactataacctttgaaagatgagtacttgttttttcaaattaaagtgaaattcatataaattagccatattaaagtgaaaaatttggccaggcacagtggctcacgcctgtaatccctgtacttcgggaggctgagatgggcagatcacttgaggtcaggagtttgagaccagcctggccaacagggtgaaaccctgtctctactaaaaatacagaaatgtagcctggcgtggtggttggtgcctgtaatcccagctactcgggagactgaggcggaagaatcgcttgaacccgggaggcagaggttgcagtgagccaagattgcaccactgcactccagcctgggcgtgacagagtgagactccatctcaaaaaaaaaaaaaaaaaaaatttggccgggcatgatgatacacacctgtaatcccagctgcctggaaggctgaggcaggagaatcgcttgaacctgggaagcggaggctgcagtgagctgagatcgggccactgcactccagtctgggtgacagagtgagattccatctttaaaaaaaaaaaaagtcagtaatttggtggcattcacaatgtacaatcaccatgtctatctagatccagaacattctcatgccccccaaaggaaatcccatccccagttactccccatccctccacccccagcccctggcaaccactattctgcttcctgcctctatgatttgcctgttctggacatttcagatcaatggagtcagacactgtcgccttttgtgtctggtaagcattgtttttaagtgacagtgatatctcagtgtcatcaggaatctgggcagtggctcaattctgtctcacaatgtcaaaaatgtgttttttcttatttccataattaaatacacaaccagcattatgactggttgatgtgtcttgtaagaattcttggctgagcgcaatggctcatgcctgtaatcccagcactttgggaagccgaggcgggaggatcgcttgagcccaagagttgtagaccagcctgggcaacatagtgagtccctcatctctacaaaaaaattgaaaatctagctggttgtggtggtttgtgcctgtagtcccagctgcttgggaggctgaggtgggaggattgcttgagcccaggaggtcaaggctgctgtcagccgtgattgtgccagtgtactctagcctgggcaacagagcaagcccctatctcaaaaaaataaaaaaaagaaaagaaaagaaaagaaaatatttcatctgtaggtgccttttctctttctgtctgtctctcttccctcttggaatttatttattacagaaattgagatagtgtccagaacaggtttgactcttaacatttggggctggatcattccctggggtgggacgtgtcctgtgcattgtagcatatatttagcaacatccctggcctccctgcaccagatgccagtagcagtccccttcccccaagttgtgacaattaaaaaaatgtgtctagatgttgctaagtgtccctgggggacagaatggtccccgcttgagaatcgctggtctatatattttatcggcttcaaactcaacttttttggcaaagattccttatgggtggtgtggtgtcctcccactgggaagcccgtcatgtctgatggtctctctttgtccttgacacaccatcttgcattggttactacttactgtctcctgggccttggaagctcattctgtcagtttcctagaagtggaatttctgtgtcaaataaggcacacagtgaacattgagaggctttttaagaaatagaggatgggaaattagctaggcatggtgggcgcctatagtcccagttatttgggaggctgaggcgggagaatcctgtgaacccaggaggtggaggttgcagtgagccgagatcgcaccactgcactccagcctgggtgacaagagtgagactccatctcaaaaaaaaaaaaaaaaaaagaaaaagaaatagaggacggggccgggcgcagtgtcttacgcctgtaatcccagcactttgggaggccgaggcgggtggatcacctgaggtctggagtttgagaccagcctgaccaacatggagaaaccccatctctactaaaaatacaaaaattagcagggcgtggtggcacatgcctgtaatcccagctactcaggaggctgaggcaggagaattgcttgaacccgggaggtggaagttgcagtgagagccgagattgtgccattgcactccagcctgggcaacgagagcgaaactccgtcttaaaaaaaaaaagaaagaaatagaggatgggaaattagccaggtgcggtggtgggcacctgtagtcccagctatttgggaggctgaggcaggagaatcctgtgaacccaggaggtggaggttgcagtgagctgagactgtgccactgcactccagcctgggcgacagagtgagactccatctcaaaaaaaaaaaaagaaaaatagaggacagggccgggcgcggcggctcacgcctgtaatcccagcactttgggaagtcgaggcaggtggatcacctcaggtcaggagttcaagaccagcctggccaacatggtgaaaccccatctctacaaaaacaattagccatgcatggtggcgggcacctgtagtcccagctacccgggaggctgaggcaggagaatcgtttgaacccgggaagtggaggttgcagtgagccgagatcgcgccactgcactccagactgggtgagagagcacaactccatctcaaaaaaaaaaaaaaaaaaaaaacaggacagaatctctaaaggtgatgtttaataaggacacaaggagaaaacaagagcatacatttatttgggttcagaaattacatctcatgagaaactgctcactgctattttatctgtagcagcagttgcagtctagccattctcatgggggcagcaggctataatctagaaccttacttttttttttttttgagacacagtctcgctgcatctcccaggctggaatggagtagtgtgatctcggctcactgcaacctccttctcctgggttcaagtgattcccctccctcagcctcctgagtagctgggattacaggggtctaccaccaagcctagctaattttttgtatttttagtagagacggggtttcaccatgttggccaggctggtctcaaacttctgacctcaggtgatctgcctgccccagcctcccaaactgctgggattacagccatgagccacagcagccggcttttgttgcttatttctttcttactgtacacgtgctaacaaaaaagggatggtggagcccccagggtggacatgcccagccccaggtagctgtttcttttttttttttttttgagacggagtctcgctctgtctcccaggctggagtgcagtggcgcaatcttggctcactgcaagctccacctcctgggttcccaccattctcctgcctcagcctcctgagtagctgggactacaggcgcccgccaccacacctggctaattttttttttgtattttttagtacagacagggtttcacggtgttagccaggatggtctcgatctcctgacctcatgatctgcccacctcggcctcccaaagtgctgggattacaggcgtgagccaccgtgcctggcctttttctttttctttttctttttgagacggagtctcactctgttgcccaggccagagtgcagtggtgcgatctcagttcactgcaacctccacctcctgggttcaggtgattctcctgcctcaggctcctgaatagctgggattacaggtgtgtgccaccacgcctggctaattttgtatttttagtagagatggggtttcaccatgttggccaggctggtctcgaactcctgacctcaggtgatccacccaccttggcctccgaaagtgctgagattacaggcgtgagctaccgtgcccggccacaggtagccctttttatcggtgcagctgctggcatcccctgctgcaagcttccagcttccttatttgtgtttgcagcccaatcttccaggctgttctttgttagaaaataagtgatttcttgggctgctttttgttagaagggaagttctaccgaggattttttgtttccaaaaaaaaaaaaaataggcaacgtagagtagctactcacctgcataataagagattgggttgggggctgccagagatttgcgccctatgcggatggcacatctggtcctcaccggtttttcacggtctatttagatcagatacagcctccctgctagcttgtctgtaaaaatccttgccttttttttttttctgaggcggagtctcactcttgtccccaggctggagtacaatagagcgatcttggcttactgcaacctctgcctctcgggttcaagagattctcctgcctcagcctcccaagtagctgggattacaggcacatgccaccaggtctggcaaaattttcttgtatttttgtagagatgaggtattactacattggctaggctggtctcgaacttctgacctgaagtgatctgcccacctcggccccccaaagtgctgggattacaggcatgagccaccgcgcccagccatgtgcccattttttttttttttttgagatggagtctcgctctgtcgcccaggctggagtgcagtggcgcgatctcggcccactgcaagctccgcctcccgggtttacgccattctcctgcctcagcctcccgagtagctgggattacaggagtgtgccaccacgcccggctaattttttgtattttttagtagagacggggtttcaccatgttagccaggatggtctcgatctcctgacctcgtgatccacctgctttggcctcccaaagtgctgggattacaggcttgagccaccccgcctggccgtgcccattcttaagccagtcatattggctgaggaggggctgggctgattggccaggttctctcctagagatggtgtgggctgtaccacacctaaggcagtggcccaagtctgagaatggagggagaggaccctcccccttagggacctgctgttggtcagcagccagtgatcttgggtgcactgcatttcctctctgggcctcagtgccttcatctccaagctcagctcagagcatggcggtggtgtctgctgatcatattggtttagtcatcagctatttagtcagtaccttctcaggggcacagctgggggcacaggggatgcctctcagtgacgtttgagctgagactgaagagttcaggcaaatgcatctgggggaagactgcttcaggcaaaaggctagcatgtgcaaagtccctgaggaggcagagtgttcagcggagatggagggagaggaggcagcaggggcggcagggccagatccagttggccacaggaagaaatgtgggtttcatcctgtgtgtgagcgggaagccccgagcacatttgcagctgttatgatccatctggtgggtaatccctggcatgcaactgttttattcccactctggggccgggatgcctgggttcaaatcaaattctgccacttcccagctctgtgatctcgttccagttccttaccatctgtgagcctcggtttctccatctgtaaagtggcggggggggagtcattccgaagcccaactggagatgagaactcttaaaggcaccgtggggcacctggtggatgaccccaggaagctcttgcggggcttgagaatgtgtggcagggagggaagatgtcctgcagggggagcccatgagcaggtggctccgtgggcacctggggctcagtccagacgcagcgcagcctagtgggtgcacctgggagtggtctgcccaggggtgacgctccggccagcccaggctcagccagggggctctgggtgacagtgtaggctccaggctgagggttgccctgcggggtgccagctctcctgctagtcctgccctgtgtgcctgctgaggctcagacagggatgtggtatctccaggaagctgcttggcagaatcgagggaccacgaaggggtgcgggtagggggaggaggaaagacactgcatctgcttggatagaagttgcatccggccaggcacaagtggctcacacctggaatctcacactttgggaggctgaggcaggaggattgcttgaggccaggagttcaagaccagcctgggcaacagagcgagatcccccatctctacaaaaaaatctgtagtcccagctactcgggaggctaaggctggaagatcacttgaacccaggagttagaggctgcagtgagctgtgatcatgccactgcactccagcctgggcggcacagggagacccccaaccaaaaaacaacaaaaaaagctgcatcctagaccctttgcaagagactgaacgagtcctaggagtcaatgtggtccctaatggagtgtggacgattctgcagccatcatcatccttaggctgttccgctcataggattagctccctgggtggggcggtctcggggtctctcctctgatccgggctccccaccgcctgccggtcccatcacccacttcctcaccccgtcccccaggtggttcagtacatcggggagatctgccgctacctgctgaagcagccggtgcgcgaggcggagaggcgacaccgcgtgcgcctggcggtggggaacgggctgcgtcctgccatctgggaggagttcacggagcgcttcggcgtacgccaaatcggggagttctacggcgccaccgagtgcaactgcagcattgccaacatggacggcaaggtgcacaccggcagggccccggggcaggtctcggagttcagggaagaccactgtctcctcttcctggggcccctgggatacataaaacagcctggactggcgcggaaggctccgccaaggcgcacgcagggcggggtgtaaggggagttcctgggactcccggtgcaccaccagagggacaatcctgcagcctgcacagatagtcatgtgactgtggtccttgggtcaggagagttggaggataggtatggctgtgcgccctggcaagtgcctcagcctttctgagcctcagtttctgcgtgtggagattagcaaggagaatagggctctgtgtaccgtgctgttattttgttgttgttgtttgagacagagtctcgctctgtcgcccaggctggagtgcagccacgtgatcatagctcactgtagctttcagttcctgagctcaagcaatcctcctgcctcagcctcccaagtagcagcaaacagataccttcataattagcaactacttactctcttaatcatctccattctccgcttgcatgaatctccctctcctttcccaagcccctcccatccaaggccaagaacagaccgtaataatgatcataaagcaaatgtcggctgggcacagtggctcacacctgtaatcctaacactttgggaggctgaggcaggaggatcacttgagcccaggagtttgagaccagcatagccaatgtagtgagacccccttttctacagaaaataaaaaattagccaggcatggtggcaggtgcctgtagtcaatgctactaaggaggctgaggcgggaggatcacgtgagctcacgagatcgaggctgcagtgagctatgattacaccactggactccagcctgggcaacagagtgagactctgtgtctctaaaaaggaaaaaaaaaaacagcaagtgccatgggggctgggtccttaatgccaagaacaatgctccttcctcagtgtgcttggtgttggatggccagcccccagggcacttttgctcactgtagctcagattcttgcataggaaacacaccaggccaggcacggtggctcacgcctgtagggtccagccccacagggtcggtgggtttttctccctgtgtgcggagacgagagattgtagaaataaagacacaagacaaagagatgaaagaaaagacagctgggcccgggggaccactaccaccaagaggcggagaccggtagaggccccgaatgtctggctgcactgttatttactggatacaaagcaaaaggggcagggtaaagagtgtgagtcatctccaatgataggtaaggtcacgtgggtcatgcgtccactggacagggggcccttccctgcctggcagccgaggcagaggcagagagagggagagagagagaaagacagcttatgccattatttctgcatatcagagacttttagtactttcactaattttgctactgttatctagaaggcagagccaggtgtacaggatggaacatgaaggcggactaggagcatgaccactgaagcacagcatcacagggagacggttaggcctccggataactgtgggcaagcctgactgatgtcaggccctccacaagaggtggaggagtagagtcttctctaaactccccgggggaaagggagactccctttcccggtccactaagtagcaggtgtttttccttgacactaaggctaccgctagactagacttcccagacgctggcgtcaccgctagaccaaggaaccctctggtggccctgtccgggcataacagaaggctcgcactcttgtcttctggtcactactcactgtgtcccctcagctcctatctctctatggcccggttttttctaggttatgattacagagcgaggattattataatactggaataaagagtaattgctacaaactgatgactaatgatattcatatataatcatgtctatgatctagatctagtataactcttgttgttttatatattttattatactggaatggctcgtgccctcggtctcttgcctcggcacctgggtagcttgccacccacacacgcctgtaatcccagcactttgggaggctgaggtgggtggatcacttgaggtcacgagttcgagaccagtctggccaacatggcaaaaccccatctctactaaaaatacaaaaaaaaaaaaaattgtttgggctcagtggcatgcgcctgtaatcccagactcaggaggctgaggcataagaaccacttgaacgtgggaggcagaggttacagtgagcgaagattgcgccactgcattccagcctaggcgacagagtaagactctataaaaaaaggaaggaaggaaggaagggaggaacggaggaagggggaaaagcagaaagaaacacaccagacagggtgtagtggctcaaacatgttggagaagcatttctgttcatagaaccatgccaagcagggcggcgggcagcaggtgaagctctgcagtgtctgacgtagctgtagtgtccacacagaggcatctacttcctgccagcatggagggttttgtggatcaggaagtgggtgccagccagaggtcttctcttgactgaatgcaggctgggaaggtgggaggaggggccctgagttggaggcgacgcttactaccctgcttttgcagatcagccaaggtcacagagcttagaatgacactggaggtgctaggtccaagccccagggcaaggcaggcaaagtgttactgagaaggaccccgcatatccccggctccttccaactcagttcaccccattccaggtcggctcctgtggtttcaacagccgcatcctgccccacgtgtaccccatccggctggtgaaggtcaatgaggacacaatggagctgctgcgggatgcccagggcctctgcatcccctgccaggccggtgagcagggcccccgcatggtccccacccggagcaggggtccccacgccctgcctgcctagcgcagcctgaacatggccttctccctaggggagcctggcctccttgtgggtcagatcaaccaacaggacccgctgcgccgcttcgatggctatgtcagcgagagcgccaccagcaagaagatcgcccacagcgtcttcagcaagggcgacagcgcctacctctcaggtgcgcagcctgctaggccccggtgactggctgtgcggatggggatcctccacccatctgcccctctcccctctgccaggtgacgtgctagtgatggatgagctgggctacatgtacttccgggaccgtagcggggacaccttccgctggcgaggggagaacgtctccaccaccgaggtggagggcgtgctgagccgcctgctgggccagacagacgtggccgtctatggggtggctgttccaggcaagctggggttgcagggggtggtcctgaggcatggtcctgagggagctcagccaaaaggggcttagaagtacacatgcctttgggcagtgcacaacctggacaactgctcatggcagcccaggaggaagcactggatctggagccagttcacctgggtgatgttgagcctcagttttgtcatccagaaaatgggatcatgaaagcccacctgtcttagggcttcaatgagccaagcaggagctccacaaaatgtgtggctgcttccataaatgtcatcccaggttgggagagactggagattacagaccaggggctactgcttgacagtgtatctggtcctgctggtggggaggatgagaggcggggtgtcctcagctgagcctctgcctccaggagtggagggtaaggcagggatggcggccgtcgcagacccccacagcctgctggaccccaacgcgatataccaggagctgcagaaggtgctggcaccctatgcccggcccatcttcctgcgcctcctgccccaggtggacaccacaggtgcgagtctcccccactccaatctctctcttcatccatcagtgtgtctgttgattcatgtcttggtccattttgtgttgctctaaaagaatacctggccggggccaggcacggtggctcacgcctgtaatcccagcactttgggaggccgaggcgggcggatcacgaggtgaggagatcgagagcatcccggctaacacagtgaaaccctgtctctactaaaaatacaaaaaattagccgggcacggttgcgggtgcctgtagtcccagctacttgggaggctgaggcaggagaatggcatgaacctgggaggcggagtttgcagtgagcccagatcacgccactgcactccagcctgggcgatagagtgatactctgtctcaaaaaaaaaaaaaaaaaaagaatacctggccgggtgtggtggctcccgcctgtaatctccgcactttgggaggctgaggcaggtggatcacctgaggtcaggagttcgagaccagcctggccaacatggtgaaactgtgtctctactaaaaatacaaaaaaaaattagccaggcatggtggcatgcacttgtagtcccagctactcaggaggctgaggcagaagaattgcttgaacctgggaggcagaggttgcagtgagccgagatcaggccactgcactccagcctgggtgacagagtgagacaatgtctcaaaataataataataatttcaacatgatttttggtgcggacaaacaaaccatatccaaaccatttactcatcctagttcaggacagtgtcctgggactgacacaagggctcacagccagctagcactgtgggctctcacgggtcccttctgctgttttattttagtagttatttatttccattcctcacttccactgccactaagcattctgaaatagtgttttttttgtttttttttttttttttttttttttgagatggagtcttgctctgtcacccaggctggagtgcagtggcgtgatcttggctcactgcaacctctacctcctgggttcaagcgattctcctgcctcagcctcctgaatagctgggattacaggtgtgcaccaccatgcccagctaatttttttgtatttttagtagagatcgagttttaccatattggccaggctggtcttgaactcctgacctcaagtgatccacctgccttggcctcccaaagtgttgggattacacacatgagccactgcacccggcctcggtgtatcttttctttttcttttgttttttttgtttgtttgtttgtttgagacagggtcttactctgttgcccaggctggcatgcagtggcactatcatagctcactgcagcctcagcctcctgggttcaaatgatcctcccacctcagcctctggagtagctaggactacaggcaggcaccaccatgcctgactaatttttttgattttttgtagagatggggtctgtattagtccattctcatgctgctaataaagacatatccgagactgggtaatttataaaggaaagaggtttaatggaactcacagttccacatggctgggatggcctcaccatcatggcagaagacgaaggaaaagcaaagggactttttaatggtggagggcaagagagtgtgtgcaagggaactcccctttaaaaaccaccaaataaagccatcaaatctcgtgagaccccttcactatcatgagaacagcacgggaaagacccacccccatgattcaactacctcccaccgggtccctcccacaacacgtgggaagtatgggagctacaattcaagatgagatttgggtggggacacagccaaaatatatcagggtctcactgtgttgcccaggctggtctcgcagtcctgggctcaggcaaactttttcttaaaggaccagatagttaatattttcggctttgcaggccatacagcctcgattgctattcaacactgctattcttgtgcaaaagcagccatagacaatgtgcaaatgaatgagcatggctgtgtgccaataaaactttatttctaaatttttatttattttttgagacaagatcttgctgttgtccaggctggaatgcaataatgcaatcatagtttactgcagtcttctcctcctgggctcaagtgattctcccacctcagcctcccaagtagccggaactacacgcacgtgccatgacacccagctaatttaaaaaaaaaaaaaaattgttggccgggtgcggtggctcacgcctgtaatcccagcattttgagaggccgaggcgggcagatcacttgaggtcaggagttcgagaccagcctggccaacatagtgaaaccctgtctctaccaaaattttaaaaattagccacgtgtggtggtgcacgcctataatcccagctacttgggaggctgaggcaggagaatcacttgaatccaggaggtggaggttgcagtgagccgagatcacaccactgcactccagcctgggtgacaaagcaagactatgtctcaaaaaaaaaaaaaaaaaaaaaaaaaagggtttttgcagagacagagtctcactatgttgcccaggctggtcttaaactcctgggctcaagcgaccctcctgccttggcgtcccaaagtactgagattataggcatgagccattattgtgcccggccccagtaaaactttatttacaaaaacaggtggagggccaaatttggcccacaggatgtaagttgctaaactcttattcactgtgtaacagacacagccctgcctgtcatgtggggaatggacacatgaccaggcagggtgtacattttcttgccctggtgaggagtggttagggaggcctcactggaggagggggcatgaagccaggatctgacagacaagggggaatcaggcaggcaaaatggggaagaacattcctgcccaggggacagcctgtgggaaggtccagaggtgcaggagaggatattgagttgaggcctcccagaagccacctgctcagcccttatctgccccccatccccactataggcaccttcaagatccagaagacgaggctgcagcgagagggctttgacccacgccagacctcagaccggctcttcttcctggacctgaagcagggccactacctgcccttaaatgaggcagtctacactcgcatctgctcgggcgccttcgccctctgaagctgttcctctactggccacaaactctgggcctggtgggagaggccagcttgagccagacagcgctgcccaggggtggccgcctagtacacacccacctggccgagctgtacctggcacggcccatcctggactgagaaactggaacctcagaggaacccgtgcctctctgctgccttggtgcccctgtgtctgcctcctctccctgcttttcagcctctgtctccttccatccctgtccctgtctggccttaactcttccctctttttcttttctttctttctttcttttttttttaagatagagtctcactctgctgcccgggctagagtgcagtggtgggatctcggctcactgcaacctctgcctcctggggttcaagtgatcctcccacctcagcctcctgagtagctgggattacaggcacccgccaccacgtccagctaatttttatatttttagtagagacggggtttcaccatgttggtcaggttggtcttgaactcctgacctcaggtgatccgctggcctcggcctcccagagtgctgggattataggcgtgagcctctggcccggcctttcctttttcctctcctctcctgccgagagtggaacacgcgtgtcctgggagctgcatcttgtgtagggtccagctgcttttggggactgcaggaatcatctcccctgggccctggactcggactggggcctccccacctccctctcggctgtgccttacggagccccgatccaggcctcctgtggctgttgggttccagatgctgcagctccatgtgacttccaagcaggccctccgccctccctgctgaatggaggagccgggggtcccccaggccaactggaaaatctcccaggctaggccaattgccttttgcacttccccgttcctgtcacatttccccagccccaccttcccctcctgatgccctgaaagcttccggaattgactgtgaccacttggatgtcaccactgtcagcccctgccttgatgtccccatttagccatctccatggagctcctgctggagggccctgaaccctgcactgcgtggctgcccagccagctgcctcctgtcctgggaggaggcctcctgggtgtcctcatctggtgtgtctactggagggtcccacaggagaggcagcagaggggtcaggggaggtctcctgccgggggttggcctctcaagcctcaggggttctagcctgttgaatataccccacctggtggtggcccctccgatgtccccactgatggctctgacaccgtgttggtggcgatgtcccagacaatcccaccaggacggcccagacatccctactggcttcgctggtggctcatctcgaacatccacgccagcctttctggggccggccacccaggccgcctgtccgtctgtcctccctccagcagcaccccctggcccctggagtggtggggccatggcaagagacaccgtggcgtctcatgtgaactttcctgggcactgtggttttatttcctaattgatttaagaaataaacctgaagaccgtctggtgcctgctgggagcccattcattgagtgtccctatgtggcacagaacccttgctgagtttcagaaggcaggactcggccagccgggcatagtggctcatgcctgtaatcccagcactttgggaggctgaggtgggtgaatcacttgagcccaggagttcgagaccagcctggccaacatggtgaaaccctgtctctactaaaaatacaaacaaaataattagctgggcatggtggctcacacctttaattccagctactcgggaggctcaggcaggagaattgctggaacctaggaggcagaggttgcagtgcactccagcctgggtggcagagcgagactctggttcaaaatagaaagaaagagagaaagggggagggagggagggaaagagcgagagaggagaggagagggagggagggagggaatacaaaaagtagccaggcatggtggtgcgcgcacctgtaatcccagctaccccagaggctggggcaggagaattgcttgcgccgggaggtggaggttgcagtgagccgagatggtgccactgcactccatcctgggtgacagagcgagactttgtctcaaaaaaaaaaaaaaaagaaaagaaaaagaagggaccctgtaccatgtggccccatctgcaagaccaaagggaccttggggcaggggcactcgggttggccctctcgctggcctgccgagggggaggcacctccctgcagtgtctgggcctcacaggccctcgttgaccttgtggttgcaggggagggatggccagcctgcctgtgggttcctgcaggtgttgcaggatggctcagatcacggtatgtcctggcacctgtggctgccctggcagtgtcctcttccatgtacaggccggctggtgtgagagctctgggtgaaagtcgctaggcctgctggggtggccgtctgagctgggattcgaacccaggactccaagctcaggagtctatacagtattcctcccaatcgctgggggatatgttccaagaccccaaatggatgcctgaaactgaccataatactgagccctaaatatgttttgtttcttttctttcttcctttctttcctttccttctttttctttcccttcctccctccctccctcccttcctttccttcatcctttcctccctttctaattttaatttaatttaattatttatttatttttgagatggagtcctgctgtctcccaggctggagtgcagtggcacgatctcggctcactgcaagctctgcctcccaggttcacgccattttcctgcctcagcctcccgagtagctgggactacaggtgcctgccaccacgcccggctaatttttttgtatttttagtagagatggggtttcaccgtgttagccaggatggtctcaatctcctgacctcatgatccgccctcctcggcctcccaaagtgctgggattacaggcgtgagccaccgcacgtggcctaatttatttatttttaagacaaagtcttattctgttgcccaggccagagtacagtggcatgatcatagctcactgcagccttgacctcccacacacaagcaatcctccatcagcctcctgcgtggctgagactacagatatgcaccatcacgcccagctaattttttgatttgtttgcagagatgaggtcccactgtattgcccaggctggtcttgaactcctgggctgaagccatcctcctgccttggcctcccaaagtgctgggattacaggtgtgagtcaccgtgcccagtttatactggtttttcaatctcataaccaggaggctactaagtgacaaatgagtgggcatggggggagtggtgtctccagcatggatctgctggacaaaggggtgattcatgaccctgggcgggacagagagggatggagcaaggcagtccgagatttcatcatgctcctcagaacagcacgcaatttgaaacttatgaattgcttatttctggaattctccatttaatatgtttgaactgtggaaacctcagaaagagaaactttgaataagcagggactactgtactctcaactgactctcacctctgctgtccccctcgcgtgtcataatgttggcatcttgtttgttgtctctacctcaggggacaggaggtgacagagcatttgctgggagaggacactgagggggtgaccctcgtgtgcagatgagcaagtgaatttttttgttttgttttttgctttttggtttttttgagacggagtcttgctctgtcgcccaggctggagtgcagtggcacaatctgactcactgcagcctccgcctcctgggttcaagcaattctcctgcctcagcctcctcagtagctgggattgcaggcacgtgccaccacacacagctcatttttgtatttttagtagagacagggtttcaccatgttggccaggctggtctcaaactcccgacctcaggtgatccacccaccttggcctctcaaagtgctggaattacaggcgtgagccatggcacccagctgggcaagtgaattctgactaatctctctccaacctcgcaaccacttcaggaagtgtcaccatggtccccattgtacagatgcagaaactgaggcacaagaaggggaatggactcattgccaggggctccaggtgagacagtggcccagtgaactttcttgttccaaagcctctagctgcaatagtgtctaggaagttccctccaagttggccagaaaataatcccaatgactcttaggcttgaactctgttagtttttcttattaattaacagactttttgggttttatttatttatttatttatttatttatttatttattgttttgagacagagtctagctctgttgcccaggctggagtgcagtggcgagatcacggctcactgcaagctccttctcccaggttcacaccattctcctgcctcagcgtcccaagtagctgggaccacaggcgcctgcaaccacacctggctaatttgtatttttactagagacagggtttcatcgtgttagccaggatggtcgtgatctcctgacctcgtgatccacccgcctcggcctctcaaagtgctgggattacaggcgtgaggcaccgcgcccggcctatttatttatttaagagggagtcttgctctgtcgcccaggctggagtgcggtggcgcgatcttggctcactgcaacctctgcctcccgggttcaagccattctcctgcctcagactcccgaatagctgggattacaggcatgagctactacgcctggctaatttttgtatttttagtagagatggggtttctacttcatttgagaggccggtctcgaactcctcacctcaggtgatctgcctaccttggcctgccaaagtgttgggattacaggcgtgaagcaccacgcctggcctattcctttttttttttttttttttttgagacagagttttgctcgttgcccaggctggagtgcaatggcgtgatctcagctcaccacaacctccacctccggggttcaagccattctcctgcctccgactcccgagtagctgagattacaggcatgtgccaccacgcccagctaaggctttgtatttttagtagagacagggtttctccatgttggtcaggctgatcttaaactcccgacctcaggtgatccacctgccttggcctctcaaagtgctggaattacaggcgtgagccaccacgcccagccctcctttctttttgaatagtcctggcaccgttgccaaagatgagttgaccatatatgcataggtttatttctgcatcagttccaatcatttatttatatgtctatccttatgccaataccacagttttggttattgtacctttttattgtttgaaatgagaaagtatgagtcctcgtattttattcaatattgttttggctattttggggccatttgcaatttattattaattttaggatcaatttgtcaatttcaacaaaaacattgtaaatttgaaagggattacattgcatccgtagaccaatttgtggagtactgccatcttaacaatattatactttccaatccatgaacgtggaatgtcttaccatttatttagatcatctttaattttttttttcaccaaagttttagttcttttgcttgtttcgagacagggtctcactctattgcccaggctggagtggaatggcaggaacacagctcactgcagccttagtctcctgggctcaagtgatcctcccaccacagcctcccaagtagctgggaccacaggcagctgccaccgggtccagccttggcttcccaacgtgctgggattacagctgtgagccaccaagcccagctacagctctcaagaagtacagtcttgtacttcttttattaaatttatgcctactttatactttatgatgctatggtaaatggaattgttttcttaatttgctactgattttaaaatccactacctgtgtgagttgaactgcgcttacacacatcactgaaatatcccactctcagaagtggcccagcctccccaggcccaccaggccttcttccccttccagccctctgtccaggcaagaactcgattggaggcctttctgggcactcagagggacacaccaccacactaggagggttagcttaaaaaattcaacaagcatggccaggcgcagtggctttcgcctgaatgctaccactttgggaggccgaggcaggaagatcgcttgagcccaggggttcaagatcagcctagaccatatagcaagagcccgtccgtccggaaaatgtaaaaaaaaaaaaaaaaaaaattcaacaagcatattttcatcccctacttttttttgagatggagcctcgctctgtcgcccaagctggggtgcagtggcacgatctcggctcactgcaacctccgccaccccggttcaagcgattctcctgcctcagcctcccgagtagctgggactacaggcgcccgccactacgcccggttaattttttgtgttttcagtagagacggggtttcaccgtgttagccaggatggtctcgatctcctgacctcgtgatccgcccgcctcggcctcccaaagtgttgggattacaggcgtcagccaccgcgcccggcggtgcaggaattttaaaactcaccaaaatacgccctccttcagaaaatccctgccacctcgataggacgtcctcttcttgagctcccctctccggccctccctgatacagcaaggttgagcattcgggcactggcttcccgaactcacttcgactcaggcacagcaggcaaagattcaatgggtagggccggaccgactgcccgaccttcgcggtgcttcacttgcctcactgcgcatgtgccaaagacaatcacccaaagtactcgaaaccaagcggcagggccggcccttgcgcaggcgtactagcgacggccgtagggagcgcttcctcctccccgccgccgccctcgccatggccgcgccggccccgggcctcatctcggtgttctcgagttcccaggagctgggtgcggcgctagcgcagctggtggcccagcgcgcagcatgctgcctggcaggggcccgcgcccgtttcgcgctcggcctgtcgggcgggagcctcgtctcgatgctagcccgcgagctacccgccgccgtcgcccctgccgggccagctagcttagcgcgctggacgctgggcttctgcgacgagcgcctcgtgcccttcgatcacgccgagagcacgtacggcctctaccgggtgagagctacgggggccgccggggatcacgccgagagggccacagccaccgcctacaccccggctacggaggccgccgggggccatgccgaaagggccgcgcccactgtctgcacctcggctacgggggccactgggtatcatgccaagagggccgtgcccactgcctgcacctcggctacgtgggtcgctgggggtcatgccaagagggccgcgcccaccggttgccctcggctacgggggccactgggggtcatgccgagatggtcacgcccactgcctgcacctcgactacgggggccgctgggggtctagccgacagggctcgcccgcctcctgaaccccgcctacagtgggtcccgcaggacctcactgcgccctctgcctttatctaggcagggctagaaatggtctacttgcagtccgtcttcctgcttcatccggtggccaggcagagggaacggcacgggcaagggcctggaagggaatccgagtggcccatgtcaaacgatgcccataactcagccccgtagcggacgggggcacgaggaatcaggtgtagagcctgaatctcagggtcctgatctctaaccccagcgagttctcggggatccctgggcagctttgccgctctgatggctctgcttccaggctgttcatctttggctttgagcctcaggattctatagaatcagaggagcgcgctcttttaaagacagggtaactgaggcttggaggagccttggcctggccgagggaagagtgggaggggcgggctcaaaggccaggaacctcaagtcacttgagtctggcagcgtcaagggacaccccatgctgggtgtgccgtcttctctttgcatagaatcttgagctgatgatggttttgtgggttttttattaagagaaaaggcttactgaacgctttatatgcatcaattcatgagtccgtaccacagcctatgagatgttacactcatttcacagatggagaaactgaggccagaagaggtgagcttacctgcccaaggcatctagtgaccagaggggcagccagggtgtgatcctgcctcatctgacttcgtagttgggtacacatttaacttccgccttcctgtgtgtgttttccaagagcatcattaaaaagttttggccgggtgcggtggctcacgcgtgtaatcccagcactttgggaggccgacgtgagtagatcacctgaggtcaggatttcgagaccagcctggccaacatggcaaaactctgtctctactaaaaaaaaatacaaaaattggctgggtgcggtggctcacgcttgtaatcccagcactttgggaggctgaggcgggcggatcacgaggtcaggagtttgagaccaacctgaccaacatggtgaaacctgtctctactaaaaatgcaaaaattagccaggtgtggtggtgcgcacctgtaatcccagctactcgggaggctgaggcaggagtgaggcatgatcagtgaaccgagatcatgccattacactccaccctgggcgacagagtgagactgtcttaaagataaaaaaaaaaaaaagcaggtttttggccgggcgtggtggctcatacctgtaatctcagcactttgggaggccaaggatggtggatcacctgaggtcaggtgttggagaccagcctagccaacatggcaagaccccatctctactaaaaatacaaaaattagctgggtgtggtggcgtgtgcctgtaatcccggctacaggggaggctgaagcacgagaatcgcttgaatgtgggaggcagaggttgcagtgagctgagatcatgccactgcactccagcctgggcgacagttgagactctgtctcaaaataaataattgtgaaatgctgcagagtgctagggaatagggagtgagcattcgtcaagggctatggggtgggaggtcctgagaaggtgccatttgagctgagagctggagcatgtgcaggagctggccatggtcaagctgtggcaagagggctcagctaaggccaaagccgtgtgatgggagcaaacctgaagccaggacttgctccttctgccggttctctgtgaggggaatcatatcggttccctagggctacataacgaatgaccacaaactgagcggcttaaagccacaggaatttattctctcaccgttctggaggccagaagtctgaaatcaaggtgttggtggggtcacgccccatctgaaagctctttgggaggatccttcattttctcctcatcttctgggggctctgggcgttccttggcttggggtcacaccattccaattcctgtctctgtctgcacatggccttcttggattctgtgtgtcttctcatcttatataaggacgccagtcattggatttagggcccacactaatccactatgacttgttcttaactaattacatctgcaaagaccctatttccttccttccttccctccttccctcccttccttcccttccttccttcctcccttcctatactttcttttcttttcctttccttttctttctttttttgagataggatcttgttgtgttgcccaggctggagtgcagaggcatgatcgtggcttactgcagccttcagctcccgggctctatcaatccccctgcctcagcctcctcagtagctgggactacaggtgtgcaccaccaggcccagctaatttttttttttgagttggagtttcacccttgttgcccaggctggagtgcaatggcgcgatctcagctcaccacaacctccgcctcctgggttcaagtgattctcctgcctcagcctcccaagtagctgggattacaggcattcaccaccacgcccagctaattttatatttttagtagaggtgggatttctccatgttggtcaggctggtctcgaactcctgacctcaggtgatccgcctgccttggcctcccaaagtgctgggattacaggcatgagccaccgtgccaggccgctaattttttatttttggtaaatacgaagtttcactatgctgcccaggctggtctcaaactcctgggctcaaccgattgtcccacctcagcctcccaaagtgctgggattacagccgtgagccaccatgcctggccattttctgttgtttataagcctcgagtttatggtgttttgtgatagcaggctgcatagattaacacagggaccttggacaaagcagagtggtctttccaactatggatacgattgtgtccctccccagctcacacaccctccttggctccccaatgccctcagtgtggagctcatactcctcaggtcagcattcagggcagtcagcccctgcgtttacttcgtggctcaccttagcattgcctcagctcactgagctagactctgcacaaacacgaggcaccgagacatggacgccatctcagagcagaccagggcccctggggcgcctctcagtgggatagggctgcagctttctccttgatccaagtgcttttgagttaaatctgctgccaacgactccaccattcacaggccagggcatctactgtgcgctagccacaggtgctgggcctgggcaagcctggcccccactccctgtagtggggcaggtgcaggcgggggtggctgctcggaggaggtggcctgagggatgtatatgagtttcccaggcagccttaggagggagggtggggatggagaaggttacccttctccatggagggtggtgaggggctgagttttatcccaagggccgtgggaccctggaggctttgaaacaggacaatgggctggctagacaggtgcaggctatggccaggaaaccccccaaatacaacggaattgaaagactcctgttggaatgctggcccccgcaggaaccaccatgatcccgattcacccaggagggccaccctcccgtccagccccccaagagcagcagggctccctcttgcccttgaacctcctctgccctgacaggcggcgtcacccagggctcaggatcctggcttccagcattccagaggtgactcaccaaccaaagtgtcactcaccaaccgaaggaccttgcacaaatgcaccagcctccccatgcctcagtctccccatctgtaaatgagtgttatgacggtactgtcataaactccctggaggatccaggtggtcacgttactgttggtgacattgtccctctgttggctgcagacgcatcttctctccagactgccgatcccagaaagccaggtgatcaccattaaccccgagctgcctgtggaggaggcggctgaggactacgccaagaagctgagacaggtgagccccgaggagcggccgcaagggagtcacatccacgaagcggccacaccccgggcaacagagcggccttctgattgtcaccagcaggaactgccccagggatcactggcagatccctttgaggaatcccctcttcgaggccacagccctgccctggggagcctgaaggccactcggcctctgttgcccaggtaacaggcctgggtcctcacatcttggggaaatatgatgggtatggctatggctttgatcacaggctacattgagcactgtttcctgcgttacagctacttgtatttctttttttttttttttctttgagacggagtctcactctgtcgcccaggctggagtgcagtggcgtgatcatggctcactgcaagctccgcctcccgggttcacaccattctcctgcctcagcctcctgagtagctgggactacgggtgcccgccaccacgcctggttaatttttttgtatttttttagtagagacggggtttcaccatgttagccaggatggtctcgatctcctgacctcgtgatccgcccaccttggcctccaaagtgctgggattataggcgtgagccaccatgggccttttttttttttgagatggagtcttactctgtcactctgtcacctaggctggagtgcagtgatgcaatctcagctcactgcaacctctgcctcccgggctcaagtgattatcctacctcagcctcccaagtagctaggactacaggtgcctgccaccacgcctggctaatttttgtatttttagtagagacagggtttcatcatgttggccaggctggtcttgaactcctgacctcgtgatccacctacctcggcctcccaaagtgctgggatttcaggtgtgagccaccatgcccagccacagctacttgtatttttttatctgacaactgtttctgtgtcctctgagtctcccctgcccctgccacctacaacctctcaaggctgtcttctccccacgcccaggcattccaaggggactccatcccggttttcgacctgctgatcctgggggtgggccccgatggtcacacctgctcactcttcccagaccaccccctcctacaggtgagcacaccaatgcggggttccaccctagtcctgagcccagtccctaacatctgggacttccagagggagagccacctgccgggtggggtgtctagagccagggttcaagtcagcctccaccaacatacctgcctgctgggctcaatcctttcaggtctcagttgagccccttaaaacagggaccttaaactacccaccatgggattgttagtaggatgggatggaacagtggctggaccaggcctggtgtgtgtaagtgtccaagaagctgaagtgacattgtccttctgcctccatccctgggcttcctccccaaggagcgggagaagattgtggctcccatcagtgactccccgaagccaccgccacagcgtgtgaccctcacactacctgtcctgaatgcagcacgaactgtcatctttgtggcaactggagaaggcaaggcagctgttctgaaggtaacagctgagggttctagtcctgggaagttcatgggcatgtgggccccagggacagaaaatggccccagacattattgtgctgaagcatcagatctgaagaaaactcagtcattcttgggttgaaaggtaacttgaaattgcaattagaaaaaaaggaaaaaaaaaaaaaaaaccccagaaaattgcaattaaaggctagttaggtattaaccgctatgaaatgaaattgatgagatgaggccaaagctgcattcagaggtaaattaatagcattcaaatgcatttaaaaaaaattattaagtagcaaactattgaaataaatcaagtgctttcctgtagaattagaaaaaggacaataatataaatctacaaaagtcagtggcaggactaagtgaaattaaagtcagaaattaatgagttggttaatatattttaaactttaatggtaagtagatctaaaagatagaaaagctcctgacaaggctaatcaagagaaaaaaaaatcacgtggtattatgaataaaaaaaggtactgttatgtaaagtattttaggaaaatacaaattcattacagcattaaaaataaactaaataattaaaaaggttttagttgccttcattgaaaagaccaacaactacagaagaaactggaaatatatttttattttttttttgttttttgtgttattgttgttgagacagagtctccctctgtcgccaaggctggagtgcactgatgtgacctcagctcgctacaatctctacctcccaggttcaagcggttctcctgcctcagcctcttgactagctgggattataggcgcctgccaccaggcctggctaatttttgtatttttagtagagagggggtttcaccatgttggccaggctggtctcaaactgctgacctcatgtgatccacctgccttggcctcccaaagtgctgggattacagatatgagtcaccgtgcctagcctggtttttacttttctaagtggttggaaaaaagtcaaatgaagagccaggccatgcttatcatcccatctactcaggaggctaaggcaggaggattactcgagctcaggagttcgaagctatagtgaaatgtaattgcaactgtgaattaccactgcactggggaacatcacgagaactcatctccaaaaaaaataaatcaggcggggcgcggtggcttatgcctgtaatcccagcactttgggaggctgaggcaggcggatcacctgaggtcaggagttcaagaccagcctggccaacatggcgaaaccctgtctctactaaaaatacaaaaattagccaggcgtggtggcgtgcgcctgtagtcccagctactcaggagcctgaggcaggagaatcacttgaacccgggaggcggaggttgctgtgggccgagatcatgccattgcactccagcctgggcgacaagaacgaaactcagtctcaaaaaaaaaaaaaaatcaaatgaataatactccttgaccttgtgaagattctatgaagttcagattacagtgtccagaaattgttttgtttgtttgtttttttgagacagcttctcaccctgtcatccaagctggagtgcagtggcgccatctcagctcactgcaacctccacctcccgggttcaagtgcttctcctgcctcagcctcccaagtagctgggattacaggcacctgccaccacgcccagctaatttttgtatttttagtagagacagggtttcacaacattggccaggctggtctcaaactcccaacctcaagtgatccgcccccctcggcctcccaaagtgctgggattacaggcatgaaccaccgcacccggcccagaaaagttttattggaacatagcaacacccgcttatgtatatattgtctgcagctgttctggggccagaactgcagagctgagtggttgcaatagagactggatggtctgcagagcttaatctattgactctggtcttttgctgaaaaagggtgccaaccgcagtattaaacagttacagaccaggcacagtggctcatgcctgcactttgggaggctgaggcaggaggattgcttgagtctaggagtttgagactagtcttggcaacatagcaagaccctgtctctacaaaaaataaaaaattagctgggcacagtgccatgtgcctgtggtcccagatacttggcagactgaggcaagaggatcacttgagcctcagagattgaggctgcagtgagccttgatgccgtcactgtactccagcctggatgacagcgcaagaccttgtctcaaaaaaaatgcaaatagttacagtgggcggggcatggtggctcaacgtgggagttcaagaccagcctggctaatatggtgaaaccccgtctctactaaaaatataaaaaattaggccaggcgcggtggctaacgcctgtaatcccagcactttgggagacctaggcgggtggatcacctgagttcaggagttctagaccagcctgaccaacatgatgaaaccgtctctaccaaaaacaaaaaaattagccaggtgtggtgggaggcgcctgtaatcccagctacttggggggccgaggcaggagaattgcttgaaaccgggaggcggaagttgcagtgagccaagatcgcaccatcacgccatcacactccagcctgggggataagatcgagagttcatctcaaaaaaaaaaaaaaaaaaaaaaaaaacttagccgagcgtggtggcacttgcctgtaatcccagctactcaggaggctgaggcagaagaatcgcttgaaaccgggaggcggaggttgccgtgagccaagatcgtaccactgcactccagcctgggagacagagtgagactccatctcaaaataaataaataaataaataaaaatagttacagtggatagaaaggaagggactcttgtccctgctgtttggcactaggacagctgagctgggcattgtcacattttgaggatacaagagtcttatttatccttggttggggagccaggagagtgccgaggggcggtgcctgggccgcaggcagggccttactcttctgccctcttcttcagcgcattttggaggaccaggaggaaaacccgctgcccgccgccctggtccagccccacaccgggaaactgtgctggttcttggacgaggcggccgcccgcctcctgaccgtgcccttcgagaagcattccactttgtagctggccagagggacgccgcagctgggaccaggcacgcggcccatggggctgggcccctgctggccgccactctccgggctctcctttcaaaaagccacgtcgtgctgctgctggaagccaacagcctccggccagcagccctacccggggctcaacacacaggctgtggctctggacatccggatattaaaaggagcgttgctggaagtctgcactgtctcgcggtgtttgatggcagcaggcctgggggcgccctggcctgggttctgatccatagccctcatctgtggggaggaaggcggggcctgcttccctggggcatagccaccatggatgaatttcctaagacaacaggctgggcacagtggctcacgcctgtcatcccagcacttcgggaggatgaggtgggcaaatcacttgaggtcaggagttcgagactagcctggccaacatagtgaaatctcttctctactaaaaatacaaaaattagctgggcgcggtggctcacacctgtaatcccagcactttgggaggccgaggctggtggatcacgaggtcgggagttcgagaccatcctggctaacacagtgaaaccccgtctctactaaaaatacaaaaaaaaattagctgggcataggtggtgcacgcctgtagtcccagctacttgggaggctgaggcaggagaatggcataaaacccaggaggcgaagcttgcagtgagctgagatcgcaccactgcactccaacctgggagatacagcgagactccatctcgaaaaaaaaaaaaaatacaaaaattagccgggcgtagtggtgtgcacctgtaatcccagctacttgggaggctgaggcacaacaattgcttgaaccagggaggcggagcttgcagtgagctgagatcgcgccactgcactccaccctgtgtgacagagcgagactcggtctcaagaaaaaaaaaagctgggcacggtggcttacgcctgtaatctcagcactttggaaggctgaggtgggcgggtcacccgaggtcaggagtttgaaaccagcctgatcaatatggcaaaaccctatctctactgaaaatacaaaaattagctgggtgtggtggcatgcgcctgtaatcccagctacttgggaggctgaggcaggagaattgcttgaacccaggaggcggaggttgcagtgagccaagactgcgccactgcactccagcctgggcaacaagagcgaaactccgtcttaaaatgaaacaaaacaaaacaaaaaaacaaatgtattctgtcttagctatagagatcagaagtccaaggtcaaggtggcggcagggctggttccctctggaggctctgaggcagaacccatcccaggcctctcctgtccttggcattccttagcttgtggccatatcactccagtctctccttgtcttcacttggacttctttctcttgtgtgttctcgcctcctatttatttttttgatacagggtctcgctctgtcacccagactggagtgcagtggtgcaatcacagctcactgcagcctccatctcctgggctaaagcgatcctctcacctcagcctcccaagtagctggtgctacagatatgcaccaccacgcctgcctacttgtacaaattttttgcggagacggggtcttggtatgttgcccaggttggtctccaacccctgagatcaagcgatcctccagcctcagcctcccaaagtgttgggattacaggcatgagccactgtgcccagcattcttttcttataaggacacctgtcattggatttaggatcgccttgcacccagggtggtttcatctcaagataccaaatgagtattccaaataagttccaaataaatgcttatttggaataagtattccgaataaggtcacatgctgagtttcctgggtcaggacgtagacatgtcctttgggggacataagtcaaccctctgctgagctccagctgcactgacagggcgaagcactgcattcagccatgctgcggacctgctcagagccttgaaagcaccagagagtctagtctccatgtgctgggctcctgcacattttcccagaatgcatctgctcatggcccacccttcagctttctctaggccccagggacgacagtgtgggaggctggtgggtgcatgggggctgcccagccacgtgcaagtttctgtggggggatccagaggaggcacccggctgagcaggagatgggaattgaaacctgcgcagaggcggctgtgcagggtgagagtggagccgaaaccacagaaagtgaagtttgcttcaacgtcttgtcccggcaggccactcagatgtgagagtgaggaagtgggatggggcctgaccggaaggaggttggtaaacagcaaagagagctgagcggaagctcagctgtggggctggttgagggcaggaggccgtggcccccagagcggcaggcacggggctgcgaagtgaagggaaattgagctgccagcacagggaccccacatggatggttgtgcctggggctgtcaccatctcctactctttgcgagagtgacaactcttcctgctccttttgccttcggagtgaaattcacccttcccacaaggctccacgtggcccctttcacctctccctctccccagcaacatcagcccctcactcagtctccctgcagcgcacccacttcctgctgttcctggagcccgctgagcacattcccaccccagggcctttgcctgtgctgagcccgctgcccggtatctcctttcctgcagctttttgcatggcttgggccctcgctttcttttttggggggacacggtcttgctctgtcgtccaggctggagtgcagtggtgtgatctcagctcactgcaacctctacctcacgggttcacacaattctcctgcctcagcctcccaagtagttggttctacaggcacccaccaccactcccagctaattttggtatttttagtagaaacattgagtttcaccacgctggccaggctggtctcgaactcctgacctcaagcgatccacttgcctcaacctcccaaagtgctgggattacaggcatgaaccactgcgcccaactcctcgcttcctttcatctccgtgacccctccatgcccatcctctatcccctcctgctgcatttttcttccttgcccgtctcatcatctgatggttttcttttttcttttttttgagacagagtctcgccctgttgctcaggctggagtgcagtggtccgatttcagctcactgcaacctccgcctcctgggttcaagtgattctcctgactcagcctcctgagtagctaggattacaggcgcccaccacaacgcccgctattttttgtatttttagtagagacagggtttcaccatgttggccaggctggtctcgaactcctgacctcaggtgacccgcctgcctcggcctcccaaagtgctgggattacaggcttgagccacaacagccagctgaaaaaacataaatttttttaaaagaagaaatgaatcctgggctgttagtgaagattacattcagatattactagaggcttaagcaaaacagaggtttagctctttctctggagagacaccattcagggctggtagagcaatgtcacacattcttcaggaaccccagctccttctacatcattgctttgccctgtcatcagctggattctgcctcatggcccaaggtggctgcttgtgctccagccattgtgtccacgttccagctctagcatgaagaagcttcccaggattcaccgaagacacttctgctcactcctttatggccagcctgggttgcacagccccacatagcagcaaggaagtctggaagatgagtctccattggacagccatgggctccgttatgatcagggattctactactgaggccaataggagcaatggacattgagggacacgtgttctctattcatcgatgacctgcccgcctgcctcaggggctccctggggatcttgccatctgaggggccacactctggactttccttcctccagcctggagcccctgactgctgggaagtgttcagtgtccttgagaggtcttcagggacccaccccactccccagccaacgctggatccagagctcagtgcttgacactcccctcatcagaaaacctgtgatggctccatttgatcacatttccgcttggagtgtagactgcatgccctccctccctccgtccctcccttcattcattcattcattcattcattcattcatgcacacgtttattcatgcattcattcagcaaacatcgagggctgctctgtgccaggcacaaaacaggtgaaggggtggagacgcccaactaaccaaaccaggtcaaatgctgggacataaaggtcgcgcccaaccagtccaggggcacagggacggctctccaaggggctggtatctggtcttttcacctgaggggtgaagcttgggcgaccacgtgcaggaggcgggagcaagagttctctaggcactggacaagaccgcgggggtcagagggacatgggggcttcgggagctgcagggggctgagtggagccagagggctcttggagcgatgaggctgggccctcagtggtgctttcccaaagggcaatgggagagcttcgggaggtcagcacggagagttttggggtgctaaagatggggtttgggcccaagaaaagggacaccttcgctgggtgacgtggctcacacctgtaatcccagcactttgggaggctgaggcgagaggatcacctgaggtcaggagtttgaggccagcctggccaacacagggaaaccccatctctactaaacaaaacaaaacaaaattagccagaaatcgcttgaacccaggaggcgaaggtggcagtgagccaagatcatgccactgcactccagcctgggcaacagagtgagacaccgtttaaaaaaaaaagaacactttaggaggtcaaggagggtggatcacgaggtcaggagtttgagacaagcctggccaacataatgaaaccccgtctctactgaaaatacaaaaaattagccaggtgtggtggcgggcgcctgtaatcccagctactcgggaggctgaggctggagaatcacttgaacccgggaggtggaggttgcagtgagccaagatagtgccattgcactccagtctgggcgacagtgcgagagtctgtcccaaagaaaaaaaaaaggacacctttaagagacacttaaaacgtgaaatatgccaggtgtggtggctcatgcctgtaatcctaacattttgggaggccgaggtgggcggatcacttgagtccagaagtttgagaccagcctgggcaacataggaagaccccccgtgtctacaaaaaatacaaaaattagccaggcatggtggtggcgtgtgcctgtgggcccagctactctggaggctgaagtgagagggtcacttgagcacaggagttccaggctgcagtgagccatgatcgtgccactgcactccagcctgagcaacagagcaagaccctgtctctaaaaaaaaaaaaaggaaaaagaaatggagtccaggtgatggactggtgggagggacagtgttgggggcctgaagaaggaatcaaggatgaagcttcagtgcccccaagtctctctgctcacccctgccaggccacccatcctctaagaccttggcatctgcccccctgccccagcactgacctcagggacagtctgggagtgcctgtccagctctgtctccccagcctggggactcctaggagctgggccagggctgtatcctctctggggtccagcctcaccgggcacagggtaggcacagtgctggtgggggggtgtggcaccaggaactagatgccgcatccctgcccatccccctgttccagcccccatacacaacgactgctggccggtcctgccagatgtctgccctgccaccctcctccaagacgagctatgattttctttctcccacaccccacaacctaaccccggggctgtccccgcagcctctacagaaaccactggctctgggcaacacgggccccaggggagtggggaggacgcaggtgcagcgtggggtggggcaggggcggggcctctgaacccactgtgaccaagcctctcacccgccatccaggtgcccctgagccgaggaacgcaggcggtggtcgtggggaagggaagaggagccccgggagacgacagcagcatgggtgggcggccttcgagccctctggacaagcagcagcggcagcacctaaggggtgagcagccggggaggggacagggtgggagtccaggtgggtgggggctccagccattgggtccacatgctccatgcagcagatggggttcggttcagacctagggctgtcaaaacacacaggatgccttcttaatgtaaatttcacgcagtgaatctttttttattgttgagacaggatcttgtctgttgcccaagctggagtgccgtggtatgatcgtggctcactgcaaccttggcctcctgggctcaagcaattctcccgccttaacctcccaagtagctgggaccacatgcatgtaccaccatgcccaactaattatttcattggttgtttttttttttaatagagacagggtgtccctatgttggccagtttgcttttgaacttgtgggctcaagcgatcctcccgcctcagcccgaatagctgggaccacaggcgtgcaccaccacacctggctaattttttatttgttttcgtagcgacagggtctcactatgttgcccaggctggtcttgaactcctgagctcaagcgatcctcccacatcaacctcccaaagtgctgggattacaggcgggagccactgtgtccagcctgcatcttatttttagtataagtgtatcccagattttgcatagtgcacacttatgctgaaaaccaattacccctttatggttttttttttgtttgttttgttttgttttgttttttgagatggagtctccctctgttgcccaggctagagtgcagtggcgcaatcttggctcactgcaacctccgcctccaggattcaagctattctcctgcttcagcctcccgagtagctgggattacaagcatgtgccaccatgcctgactaatttttgtatttttagtagagatggggtttcaccattttggccaggttggtctcgaactcctgatctcaggtgatctgctcacctcagcctcccaaagtgctgggattacaggtgtgagccactgtgcccagaagactgtgtcttctatttttatttggtaaatctagtgacctgatttagggcaggggttcaggtgggaggcatagggccaagtggagggtgtcccagacccagccaggccctgagggatgtcttcctgagcgggcagggaccagcaggcccctcggtaggaccctggggatggaggctcagttcccaatttgagactaagaggggccagtgccagattcagtgccattcgggtccctctgtcctcatatgtggggtgagcaactgtgctgggcgctggggacattgtggggttggtattggccttaccctcacaggctcatggtctaaacaccttccctctggtggctctgctatgtggggcttctgtgcccaaggtgacctcatggcacagaacggctgctggagctccagccattgggtctacattccatgcagcagcatggaagagtgtttttttggtttttgggtcaagtcatgacccaaaattgcatggtgagaatgatgggagagagctcacatgttccttgagggtagggaagagcagaggtggatgactgcccactgaggagacaatgatcaagccagggctggagggatgtgatggtgttggaaggaaggagataccagaagagcattttggacaggagaaacagcatgtgctaaggccagtgatgtatcttgcaaacaaacaattcacgttcacaccctggtcattccctcatttgctgtgtgccctttggtgagtgacttcacctccctgggcttcattctcttatatgtaaaatggggatagcaacaacgcctagctcatggggctgggggggcattgtaaggattcaaagagttactctatgtagcactgggatttttttcccccagatagtggcttaaacaagataaggattttttttttttctcctcaaactgagaggtgtggaagcaggcaggctagtaaaagttagacacctaaagtcctttcatctcatggctctgccatgtgtggattcctgtgcccaaggtagcctcatggcacagaatggctgctggagctccagccattgggtccacattccgggcagcagaatggaactatgttttatttacagtcaagtgtacaagccttagggcaacagctcaaagagctagtcacccatcacccatatgactacttcccagatagatcaggatacagcacacctccatcactcacagaaagttcacttgtgtgctttggagctttaaaagcttttgaaaagctccccaggtaaagcatatggggacacttttgggtgtgatggatccgctcatcttgattgtggtgagggtttcacggatgtgtgattgtgtcaaagctcagcaaaccatatgcttacatgatacgtgagctataagtgaaggtgtggctcaatctgtattcccagcgctttgagaaaccaaggtgggaggattgcttgaggccaggagtttgagaccagcctggataacatagcaagaccttgtctctacaaaaataaaaaaattagctgggcatggtggcacgtgcacatgatcccagctactggagtggggctgaggtgggaggatcacttgagcccaggaggtcaaggctgcagtgagctgagattgcaccactgcactccagcctgggggacagacaccctgtctcaaaaaaaagaaaaaaaagtgcaagacaagtggatcactggagctcaggagttcaagaccagcctgagcaacatggcgaaacctcgtctctactaaaaatagaaaaattagtcagtcgtggtggcagaagcctgtagtctctgtagtcccagctacttgggaggctgagatgggagaatcacctgagcccaggaagtagaggttgcagtgagctgtgatcgtgccagcgcactccagcctgacaacagagtgagactccatcaaaacaaaaaacaaaaaacaaaacaaaacaaaacaaaaaacccgtctctactaaaaaatacaaaaattagcccagcatgatggcgtgcgcctgtagtcccagctactcgagaggctgaggcgggagaattgcttgaacccaggaggcagaggttgcagtgagctgagatcgtgccactgcacttcagcctggcaacggagcaagactccatctcaaaaaaaaaaaaaaaaaaaaaaaaaagaagctccctcacccagccacatggatggaaacaggcatggagggtgaaggatgaatgaaatttggtgacaacttgtctggaagctcaggatgactacaggagcccccaggtggcttccctgtctgttttgccctccccaagcaggtctcctgggcagattcaatttgctgggttcactgtccccttgtccctgcaggtcaggtggacaccctgctgaggaacttcctgccttgctaccgtgggcagctggcagcgtctgtcctgcggcagatctctcgagagctgggccctcaggagccgaccggaagccagttgctacgcagcaaagtgggtgttgtgggggcagaggacgtttgagtgttaggggagggtcctggaggagccctccctaggccatgcttccaacctcagacctttgccattgccataggatgactttaaatatgcattgtttaaataaacattcactgagcagccaagcaaggtggctcccgtctgtaatcccagcactttgggaggccaaggcaggcggatcaccagaggtcaagagttcaagaccagcctcgccaacatggtgaaaccccgaaaccccatctctactaaaaatacaaaaaaaaatttagccagaccctgtagcgcgcacctgtagtcccagctacttgggaggctgaggcaggagaatcgtttgaacctgggaggtggagattgcagtgagcccagattgtgccactgcattccagcctaggcaacagagctagactctgtcaaacacacacacacacacacacacacacacacacacacacacacacacaaccattcactgagcatgtaattcatgccacatcatgggctgggcatgaggacacacagcccttgtccagtgacaaggacagatcctgcggtaacctctggggttcacaacctgatgggaggtagaagactccaaacaagttagcatatcatgatgtggaatggagtaacattttcttttagatggagttttgctctcttgcccaggctgtagttcagtggcgcaatcttagctcactgccacctccacctcccaggttcaagcgattctcgtgcctcagcctcccgagtagctgggaccacaggcgcccgccaccatgcctgggtaatttttgtatttttggtagagacggggtttcaccatgttggccaggctgatctcgaactcctgacctcaagtgatctccccaccttggcctcccaaagtgctgggattacaagcgtgagcgcctggcctccagacatctctggagccatgaggttgtgtgccccacacacctcactcagtcttcacccctttggtagacaggtctttgactgatgaggaaactgaggcacagagaggccaaatggccttctcgaggtcacactacagaggtgtgatttcaacctgggatccacgcttattactaatgcttggtcccacgctccagttggggctgagattttttgcctctccggaatgccccacttcccagctgtgcccacccagggcggggggctccaggagctgtggacacagagccccttcctgcctaggactctctctgtccagcctggggcatcacgggaccttagcgtcaccccaggatacagcgggtgtctgggtggtcgggccacagggacatcagcccacagccccctgacacccactgctccctctttctgcagaagctgccccgagtccgtgagcaccgaggacccctgacccagcttcggggccacccaccccggtggcagccgatcttctgtgttctgcgtggggacggccgcctagagtggttcagccacaaggaggtgcgtgattggcacgtggcctttctacttctgggtccctccttcccacccccgtcagcctcaaggtttgtgggatccatatctcagcatagccccacctctatcaatcacccaggatgaatcttgtgcccctatgtgtttggcctgttgtaggcaaccatctcgtcccatcccctgctgtgctgggtgggtaaactgaggcccaggccagggatagggtcgtggtcagtatcagagctgtggtttcaacctcttggggcctttgcaagtcacacctctggccgctctgctttctggctggggagcttggagcgatcactacctttctgaaactcagtttccacttctgtgaaatgggatgtttcacaccatgtagggctttgagggttcaacaagagggtcctcagacagcacttgggaccggaccggcacgtggggagcccgtgggtgctgggagctcagggactgagggaggaagggagggaaaggggaaagggaaggagggagagagagggcaagaacaggagggaggaagggagaaagttatgggggcagaggtaggatggatggagggagagaggaggaaaaaaaaagggagggagagccgggcctcgtggctcacgcctataatcccagccctttgggaggctgaggcaaatagatcccttcagcccaggagttcaagaacagcctggccaacatggtgaaactccgtctctactaaaaatacaaaacctagggccaggcacggtggctcaggcctgtaatgccaacactttgggagaccaaggcaagtggatcacctgaggtcaggagttcaagaccagcctgggcaacatggcgaaaccccgtctcaattaaaaatacaaaaattagcctgctgtggtggcgggtgcctgtaatcccagctactcgggaggctgaggtggaagaatcacttgaacttgggaggtggaggttgcggtgagctgagatcgcgccatcgcactccagcctgggtgacagagtgagactctgtctcaaaaacaaaaaaaaaaaaaaagagagagggaggaatggaggaaaggagagggagggaggggtgggaggggcagaggatttttcagctcatctgaaatcttcccttgatggtatagttgggacacagaagccacagttcagacctgtcccaggttggttctctgggtaccttttgtaggaatatgaaaacgggggccactgccttggctcaacagccctgacaggatacacgctcctgacttcccagcgagaatatctccgccttttggatgctctctgccctgaatccttgggtaagggtcccggggttcccaggaacaggtttctccaccccagcatcattaacatgtggggccagatcattctctgcggtgggggcgtcccgtgtacagcagggcagtaagcagcatccctggcttccacccactccctgcctgcagcagcccccaccctgggtgcgacaaccaccaatgtctccagcattgccaagtgtctcccgggggcagcgttgctacgggtgagcatccctactctggaaaacaaacaaacaaacaaacaaacaaacacccactcttgcaagggtgagggggagagttaggtcatgggaccagaatcagaatagcaaaggataaaaacagtaaaatctgggatgggtgcactgtctcatgcctgtagtcccagctactcgggaggctgaggcgggaggatcgcttaagcctgggaggtggtggcagtgagccgagattgccccactgcactccagcctgggcaatagactgaaaccccatctccaaaaacaacaacaaaaacaattaaaaacaataggctgggcacggtggctcatgcctataatcccaccactttgggaggccgaggtgggcggatcacttgaggtcaggagttcgagactagcctggccaacgtggtgaaacctcgtctctactaaaaatacaaaaattagccggtgtaatgacatgcgcctgtaatccgagcactttgggggaccaaggcaggtggatcacctgaggtcaggaggagacctcatgaggccagcctgaccaatatggtgaaaccctgtctctactaaaaatacaaaaggtaggccgggcgtggtggctcacgcctgtaatcccagcactttgggaggctgaggcgggcagatcatgaagtcaggagatcaagaccatcctggctaacatggtgaaaccccatctctactaaaaatacaaaaaattagccagttgtggtggcgggcacctgtagtcccaactactcaggaggctgaggcaggagaatggcgtgaacccgggaggcagagcttgcagtgagccgagatcgcgccactgcactccagccagggtgacagagcaagactccatctcaaaaaaaaaaaaaaaaagaaaagaaaagaaattagagaaggaacaattccaattccaggcatgtgcctggcaaataactcagcattgggcttgcactatctcataaagtctgcccagcaggcaggcccatcactaactaccccatttcacagataaggacattgaggctgaggattgtcacacagtcaagggcagagctagaattgcaccctctgcttcacctaaaagctatcttgctgtcaaaggacacaaaaatgtagtctgctgagatgttgatgctgctcaaaacatcagaatctgcccaaatacccatctcttgagggttgattaaatatattatggcctggcccttggtaatgaacagtgagctggctgtggcggcatatgcctgtagtcccaggtacttgggaggcagagacaggaggatcccctgaggccaggagttccagaccagcctgggtaacatagtgagacccccatctccacaaacattttaaaaaataaaattacctaggtgtggtggcatgtgccggtagtcccagctactcagaaggcagaggcgggaggatcacttgagcccaggagttaggggctgctgtgaactatgatcacaccattgaactccagcagcctgggcaacagagccaggagctgtctctatttaaataaataaataaataaataaaaacctgggtgcggtggctcatgcctgtaatcccagcactttgggaggccaaggcgggcagatcacctgaggtcccagcctggccaacatggcgaaaccccacctctactaaaaatacaaaaattagccgagcgtggtggcacacgcctataatcccagctactcaggagaccgaggcaggagaattgcttgaacctgggaggcagaggttatagtgagccaagacagcgccactttactccagcatgggagacagagcaagactctgtcaaaaaaaaaaaaaaaaagccaggtggctcacgcctgcagtctcagcactttgagaggccaaagtgggaggatcactcgagcctaggagtttgaggccaccgtgagctatgatcacaccactgtattccagcctgggcagcagaggaagactccatctctgaaataaaaataaattaaaatttaaaaacaataaataaaagaaagcaaaacttagccactgaaagtgtcccagacgtatcaaggagcaaaatgaccagttccaaggcagaaaatcccatcttgtcacagatatgcacctcacacagtttcacgcagattttagaatctggagaaatgtcccctaaactattaacagtcattatcgtctctgggggctgaggctggaagactgagatgatcaggagcttccaccttctggactattgatttccttttcttttcttcttctttttgtttttggacagagtcttgctcttgctctgtctcccaggctcaagtgcagtggcatgatctctgctcactgcaacctccgcctcccaggctcaagtgatcctcctgcctcaacctcctgagtagctgagaccataggcacctgccaccacaccctgtaaattttgtgttttagtagagacggggtttcaccacgttggccaggctggtctcgaactcctgacctcacgtgatccgcctgcctcaggctcccaaagtgctgggattacaggcatgacccacctcgcctggcctggattgttgggttttatcgcagtctgtgtttatcatcctggaaagtggaacaaaacactggagacaggataccctaaatatttcttttcatatacttatgtttttaataaaaaatatcttgtgcaggctggtctggaactcctgggcccaagggatcctcccacttcagcctccaaaggtgctgggattacaggcatgagccaccgcggctggtccccaaataaattaaccaaagctgaattcacttattttgtcttgtcaataattctaggtcatcggtatcactgttaaccccatttgggcaggaaaatcacagctcatagagctgtgtgccctagtcatagagctagaaagtagcttggccaggctgggcacaatggctcacacctgtaatcctagtactttgggaggctgaggcaggcagatcgcttgagctcaggagttcaagaccagcctgggtaacatagtgagaccctgtcccttttgttaaaaaaagaaagaaaatgaaagtggtttggtcaggttggaacccgggtctgactgactccaaaaccccacataaagccggacgactcagataacatcccagcttgaatggattggtggtggctgccaggaggactgtattaaggatgctaaggctggaaaacagttctgggatggattggtgatgtctgccttgggcatgcagtggaagaaggtgaccctgcctcccccaaaactgtgccccacccagtgctgttggaataaggatggtggcaagtatcgtggtatgactcatatttatcgagcaactgcccatgccagggactgctgtatgcatttcaggggtattttctcctagtgaatgaacgtctagaagatgcgacctcctgtttgttttcaggagaccatactcaggaagagcctgactccctcttggaagtgcctgtgagcttcccgctgttcctgcagcaccccttccgccggcacctctgcttctctgcagccaccagggaggcacagcatgcctggaggctggccctgcagggtggcatccggcttcagggcataggtgggtctcaggacgggtcagacatttgtggggctaatggtctggggtcagatggctcagcctctgttggctcgggacctctccaggcctcactttctttacccagaaaatgggtttttaggccaggtgtggtggttcatgcctgtaattctagcattttgggaggccgaggcaggcagatcacccaatgtcaggagttcgagaccagcctggacaacatggcgaaatcctgtctctactaaaaatacaaaaattagctgggcatggtggaaggcacctgtaatcccagccactcgggaggctgaggcaggagaatcacttgaacccgggaggtggaggttgcagtgagccaagatcgcggcactgcactccagcctgggcaacaagagcaaaactccatcacacacacacacacacacgagaagaaaatgggttgttgggggagccagaagggacaccaggcagttgtgagtgactagggctgtaacagagacacacagggtgctatgggagctcagcctgagggatgggggttagagcaggcttcccagatgaggggaagctggggtctgtaaaagatgaaggactagccgctgggcgcggtggctcacacctgtaatcccagcactttgggaggccgaggcgggaggatcacgaggtcaggagattgagaccatcctcgctaacacggtgaaaccccatctctactaaaaatacaaaaaattagccgagcgtggtggcaggcgcctgtagtcccagctactcgggaggctgaggcaggagaatggcatgaacccaggaggtggagcttgcagtaagccgagatggtgccactgcactccagcctgggcaacagagtgagactctgtcttaaaaaaaaaaaaaaaaaaagatgaggggccagccagatgaagaaggggaataggtcaggcacagtggcgtggtggcatgagcttgtggtctcagctactcaggaggcttaggtgggaggatcacttgagcccaggacttggaggctgcagtaagcaatgatcatgctaccgcacttcagcctgagcaacagagagaccccctgagaaagagagagaaaagaaaagaaaagaggagagaagagaacagaagaaagaaaagaaggaaaaagaaaggaaagaaaaagaaaagaaaggagaaagaaagaagaaagaaagcaagaaagaaagaaagagaaagaaagaaagagagggagggagggaaaggaaggaagaaagggaggaagggaaagagagaaagaaaaaagtaggggagcagcaggactgacacacacagttgggcaggttgttgactgcacaaacgatgcaactagaggaacagctagtggctgcagtatgtatggcctgaactgctggtcacggggctgtggctgccagtagagggttccttctaagttgaataaacatgatggtcttgggggactgtgttccctgtggagggcattgcctatgcaaagttccagagatgggtgagacttgggtgttggggacctggccaggcggagggcttcctccccgggccatcgggagccaggcaggggagctaccagcaggcactgaggagcagcccctctcagtcctgcagcgaagccaggcccctgctgcccgggccttcctggacgccgtccgactctaccggcagcaccaaggccactttggcgacgacgacgtgaccctaggctcagacgccgaggttagtgccccgcgaggccgcacccgggacccccaggaccctcccggccgaccgcggcgcccatggccccctctcctgcaggtgctgaccgcggtgctgatgcgggagcaacttcccgcgctgcgagcccagacccttcctggcctgcggggggcaggccgcgcccgcgcctgggcctggaccgaggtatgcacggcgtccggatccgggatagggggcgggatgcgggcgttcgggttcccctcccacgactgtcgcctaaaccctctcccgatctctctgacccccatccccgccccgtgtctcggctttgtcccccctcgaccggtctgggcagcttctagacgccgttcacgcagctgtcctggccggggcctccgccgggctctgcgccttccagcccgaaaaggacgagctgcttgcgtcgctggagaagacgatccgcccggacgtggaccagctgctgcggcagcgggcgcgtgtggcggggcggctgaggagtgaggccctggggcggagcctgggctgggaggggcgaggcgatgctggggaaaaaggggcgtgacctaagcgaagaatgggcttgaagttatgtaaaatgggggcgtggtcagagaggggcggggccaagcataggatgtgcaagggaacgggtggggaaggggcggggccaaagcgaggcggtgggcgtggtcttgtggtcgaggcactgggggcggggcctagagtctgtccggaggaaaccaggtcctaagggggctgcttggatacaaaaagggcggggcctcagcgggggataggcgtggccttgaggctgaggctcgaggagttgaggcccagagccgggccaatgcgggtgggcgggcctgggaagtagaacagcggaggaggggcgggggtaaaggctgatacatgggcagcggtgggccaaggtggcccctacaaagacccaggtgggaatcctgactgggcccgcccctccgaggctcagttttctcatcattacaatgggtagaagagggcgctcagcgtccctgctcgcgtccccctcgcgagggcccctgcacatccccatctgtgaggcaccttgcggaggggactccagaccagtgtcttccactcccagcggatatcaggggaccgctcgagtcgtgcctgcgccgggaggtggacccgcagctgccccgggtcgtgcagaccctgctgcgcaccgtggaagcctcgctcgaggcggtgcggaccctcctggctcaaggcatggaccgactgtcccaccgcctgcgccagagcccctcaggcacgcggctgcgcagggaggtgagctcccgtgggtaggggttcagtgagccagagggtgatgtgttaacttgagtctttcctgtggagaatcttcactgaatttgttctaggctgctttttacttattgtggacccatcaccatgctatggtcagtggagcacagtttttgtttgttttttgtttttgagacaggggtgtcgctctgtcaccctggctgaagtgtagtggcacaatcttaactcactgcagcctcgacctcccgggcttaatcaatcctcttactttagcatcccaagtagctggaaatacaggcgcacgccaccaagcccagctaattttttaatttttttgtagagatgggggtcttgctttgttgcccaggctggtctcaaactcctgggctcaagcgatctgcctgcattggcctcccaaagtgctgggattacaggcttgagccaccgcactggccatggaacacagtttaaaacgtgaggggaaaggagttggatgagaaaagtggcaatttagcaaaatcagtctgaggtcatcccccaaactcctcctcccattcccctgtagggcaacaacccagagaattctgctcaaggcaggtcacctcagtgcatctgatatacaagtagcacctaaaatacatacatacatatatacatacatacatacatacatacatacatacatacatacatagaatagcacctactatgtaccaggcaaccttcaactcattcttaagcctccatttcctaatcaccttctccaggaactgtccctggtcccctctatgtcttgcagtagcctgtgcttctcttatcacagcctgactttcataccactgtgggtgatttctatactctgtctcccctaatttgtaagcagagactgggttagagtattccatttctgcagccccagggcccagcacagacagaacatgagatggtattcacagatctgggccaggaaatgtgctcatttcctctcaattgtgccagcatcgcttgttatagttttttcaggttttatcattttatgtccatgacaccgtgcctcactgctacttattttattttattttattttattttattttattttattttattttattttattttatttttgagacagagtctcattttgccgcccaggctgaagtgcagtggtgcgatcttggctcactgcaacctcctgggttcaagcaattctcatgcctcagcctcccaagtagctgggagtacaggtgtgtgccactacacctagctaatttttgtatttttagttgagacagggtttcaccatgctggccaggctggtatcgaactcctcacctcaagtgatccacccacctcggcctcccaaactgatgggactacaggtgtgagccaccatgcctggcccaccactattgtattatgagtttctttggtgacagctgagacgggatgtattttcatttgtgtttctcctttggtgaattggtaatggggtccctggccctttgcaatcagctgacagcatttttcccccaaaactgcttccgggagcacaggtttactcatttggggagatgccgtgggacttggcgctgatgcagacatgctaccgtgaggccgagcggagccgggggcgcttggggcagctggcagcaccgtttggctttctggggatgcagagcctcgtgtttggggcccaagatcttgcacagcaggtgagggtgagaggaggctgggatgaggccaggctgtgaagacagcctccactgacctcctgctaagtgtgccctggagagaccacgatgatcgagacaactccgcggggctgccagtctcatggggacatgagcccgtgaccaggcagcagccacatgtggtggacagagctggggcagggtgtacagggagcgccaaggatgttcctgatccacctctggggttgacaggactttcaggaggaggggacttccaacatgggagagcaatgggaggaatggcgttgccaccagtcccgagtgaatagtgttgagagtgcttgtctgcatttggggaacgtggagcaatttttcagaaatggggaagataggccggcgacatggacgggcagatcgcgcagtgccttgagcgtggggctaaggggtgagctctttcctgagggcaatggggagccagagcaggtatgtgagcagggggagggcatggctggatttaaggtttaggaagctttgcctgccatagggagcacaggctgttggggacaggaaaagaggaggcagggaggaggcctgcaccaggatgggggatgtcagtggggagaagcaataagtgttttgaagtctgagatgggacctgctgatggacatggtgacagaagaagacagagagtgagatgatccagcactacctggcacagttgttcagtttgtgcactgcacaaaagcactcagtggaggaggctgaactctggctggctccctactccccattctgggcatcctggcaccatctcccagagggaaggggctttctgtcagtttgcacatagtcccccacagactagacaatccccaggtcctgagaggaggggaaaggtgtttcctgggacaaggaggaggaggttgggcagaggtggctggttggaacaggttggatgctgagaaggggtcagctgggcaggagtggggcccgggaggctggagcacagattctggggtcatcatagcatctcctcccacagctcatggctgacgccgtggccaccttcctgcagctggctgaccagtgtctgacgacggccctcaactgtgaccaggctgcccagaggctggagagagtcagggggcgcgtgctgaaggtgtgttctgtgggtacggggtggcatggggtggcagtgggcctgggtgctcagatggttgctggacgcaccgctgggtgtgttgtgcagaaattcaaatcggacagcgggttggcgcagaggaggttcatccgaggctggggtctctgcatctttttaccttttgtgctgagccaactcgagccaggctgcaaaaaggtgagttaatgggaagtgtgcaagagggtctgacagcatcaccatgcatccacttaaagtgggcaagaatgctctttgaggctgggcgcagtggctcatgcctgtaatcccagcaatttgggaggccaaggcaggcagatcacaaggtcaggagttcgagactagcctggctaacatagtgaaaccctgtctctactaaaaatacaaaaaattagccaggcatggtgatgggcgcctgtaattccagctactcaggaggctgaagcaggaaaatcgcttgaacccgggaggggaaggttgcagtgagccgagatcgcgccattgcactccagcctgggcgacagagtgaaactcagtctcaaaaaaaaaaaaaaaaaagaatgctctttgatcattagagaccatttgaccttaatcctagcactttgggaggccaaagtgtggggattgcttgaggccaggagatcagtctgtacaacatagtgaaactccatctctataaaaatacagaagttagccaggcgtgacagcatgtgcctgtggtcccagctactctggaggccaagaggtgggaggatcaattgagcctaggaagtcgaggctgcagtgagctaggatcgcaccactgcactccagcctgggcaacagagcaagggcctgtctctttttaagagacttccataccctgagccctggagctgggtcaggtggcttttctgggcttccacaatgccctctgcttcacctatgacggggttcattaccctgtgtctgccacagaagagctgggatgggtcccacacatcgcatatcacctggtgacatgggcatcagtggagggaggaggtggatggagagtgggtaagggttgggtggggagttaccagggagtcaggaaggatgtccctgtgaaatgaaggcatgggccatgtcccgggaagggcattccaggcagagggcacagcatgtgcaaaggccctgaggcctgaccatgcctggtgtgttggaggaacagtgacaaggtgggtgtggctgaagctcagtgagtggaagagtgggaaggaggtcagcgggagtcctaggtacctaggcacacagggctcatgggcaccaggcgggtgtctgacatgggtacaaacagaatcctctagaggaagtggctgggaattggggaagtctcagctgagacactcatactattccctgtgaggtgtgatttgctgtgcctaattaatcccatgaatcctttccacaacactagagaatatgggccactgagtccattttaaagataaggaaactgaggccaggcgtggtggcacatgcctgtaatagcagcactttgggatagtgagaccccacctctacaaaaaatacaagaattcgccagatgtggtggtgcacgcctgtagtccaagctacttgggaggccgaggtgggaggatcgcttgagcctgggaggtcaaggctgcagcgagccatgactgcacccctgtagtccagcctgggtgacagagagagactattttatttattttattttattttattttattttattttattttattttattttattttatttttagacggagtctcactctgtcgcccaggctgtagtgcagtggtgtgatcttggctcactgcaacctccacctcctaggttcaagcgatcctcccatctcagcctcccaagtagctgggattacaggcacccgctatagggaccagccccacagggtcggtgggtctctccctgtgtgcagagacaagagagtgtagaaataaagacacaagacaaagagataaaagaaaagacagctgggcccgggggaccactactaccaagttgcggagaccggtagtggccccgaatgtctggctgcgctgttatttattggatacaaagcaaaaggggcagggtaaagagtgtgagtcatctccaatgataggtaaggtcacgtgggtcatgtgtccactggacagggggcccctccctgcctggcagctgaggcagagagagagaggagacaaagagaaagacagcttaagccattatttctgcatatcagagacttttagtactttcactaactgactactgctatctagaaggcagagccaggtgtacaggatggaacacgaaggcggactaggagcgagaccactgaagcacagcatcacagggagacggttaggtctctggataactgtgggcaagcctgactgatatcaggccctccacaagaggtggaggagcagagtcttctctaaactcccccggagaaaaggagactccctttcccggtctgctaagtagccggtgtttttccttgacacttttcgctaccgctagaccacggtctgcctggcaacaggcatcttcccagacgctggcgtcaccgctagaccaaggagcccttctgctggccctgtccgggcataacagaaggctcgcactcttgtcttctggtcatacctcactatgccccctcagctcctatctctgtatggcctggtttttcctaggttatgattgtagagtgaggattattataatattggaataaagagtaactgctaccaactaatcattaatgatattcatatataatcatatctaatatctatatctggtataactattcttgttttatattttgttatactggaacagctcatgtcctcggtctcttgcctcagcacctgggtggcttgccgcccacaacccgccaccacgcccagctaatttttgtacttttagtagagacggtggtttcaccatgttggtcaggctggtcttgaactcctgacctcatgatccgcccacctcagccaaccaaagtgctgggattacaggcatgagccaccgcacccggcctgtttattttaaaataaaaatatttaaaaataaagataaggaaactaaggcccaagccccgccccccaaccccacagctaatcaggcccagggctagggcagaagcctgtgttgtaggcctctagaggggccctcctctccatccgagcccctaacccgccatggttccaggagctgcctgagttcgagggggatgtccttgccgtgggcagccaggctctgaccactgagggcatctatgaggacgtcatccgggggtgcttgctgcagaggattgaccaaggtgagtcccgccctgccatggctcagaggagcctggcgtcccttggctgtatgtaccgagccccaccagggccacatcgactctcacttcctgtgaatacttgccatttgaccttaagtcaggacttggcctgaggaggtccagggtagaggagctcagaggggcagggatggatactctctgaaggaagggccgttggactggggctgtgagggatgtataggagttctcaggatgagaagaaggaggcagagttcaaaaactactgatagaggctgggtgtggtggctcacacctgtaatcccagcactttggaaggctgaggtgggcagatcacttgaggtcaggagtttgagaccagcctgtccaacatggtgaaaccccgtctctactaaaaatacaaaaaattagccgggcatgatggcacatgcctgtagtcccagctactcgggaggctgaggcagcagaatcgcttgaacccaggaggcggaggttgcagtgagacaagatcgcgccactgcactgcagcctggcgacagaacgagactatgtcttttttttttttttttttttttgagacagagtctcgctctgtcacccaggctggagtgcagtggaacgatcttggctcactgcaacctctgcctcctgggttcaagtgattctcctgcctcagcctcccgagtagctgggactacaggcatgtgccaccacgcccggctaatttttgtatttttagtagagatggggtttcaccatgttggtcaggctggtctcaaactcctgacatcgtgatcctccccccttgggctcccaaagtgctgggattacaggcgtgagccaccgcacccggccaagactccatcttttattttttattttatttttgagacagagtctcactctgtcacccaggcaggagtgcaatggcatggtctcggctcactgcaacctccgcctcctgggttcaagccattctcctgtctcagcctccaagtagctgggactacaggtgcatgccagcacacctggctaatttttgaatttttagtagagatggggtttcactatgttggccaggctggtctcgaactcatgacctcgtgatccgcctgacttggcctcccaaagtgctgggattaccggcgtgagagacatcgtcttaaaacaaacaaaactacggatagacatttaaatttattcatttaacaaccactccctgtttttctctgggctggcattgaggccctagaggttttcagacttggagttggcctcttaggagctcccgagctgggaaggagctccagaaacatctttctccctcctgcttcctgagttcattcatggattaattaatgcccatgatcactgagatgtgtgcactgattggggggtgaacaggatgcagtggggattcagggaatgtgagcatccatgcagccagcacaagggcacggagcgggaggctggaggctgctggaagatgcgcaaggccttgaatgacaggcagaggaatttagacttatggtgcaggcagtggggagccatggagggtgtgtgagcagaggtcaacagaagccagactggaagtgagggaggaggctgaggccccggttctgggaacaaaggacaggcccgagcaggggcagcagccaagggaacagagtctaggagggaggtgcgggtgggagctggaggtgccagaagtgttgggcttcaggtgtcactaagtgaaggagaggggttccacaagccagggaaggtgtgtggagaacagaggggaatctcaaagagccctcatttgaaggaaagaggaagaacagacatagaaggtgagttcagcagccaggcactgtggctcacgcctgtaaacccagcactttgggaggttgaggagggtggatcactggaggtcaggagtttgagaccagcttggccaacatggtgaaaccccgtctctactaaaaatacaaaaattagctgggcatggtggcacatgcctgtagtcccagctacttgggaggctgaggcaggagaatggcgtgaacccaggaggcggagcttgcagtgagccgagattgcaccactgcactccagcctgggcgacagagcgagactccatctcaaaaaaaagttgtttttttttttttaaataaggtgaggtcagagagttgggagacacccccatagatggtgggttcttgggagccagggaatgagggagaggatgtgtctgtgagcatctaaacaagaaaaatggagcttccttaaaatagcagaagttttaaataggaataaaagctattttctgactgcagaattaaatccagaaacagttgacctcaataagtttctcttcctaaagattttatgtatccttaagtgggtccatcctgaattgatttgtgatgtctgcctagagcagcatgttgggaggtgggactggcagtgtccaggctcagtgaagggtgcagggatcggttagcaatgtctgccatgggtgcgggcttggagagaggctctatgtgagccacctctttaggatttctgcttgagacatttgtagtctctctgggaaaatgcagggaagccccttgatgcctgggcttccccaggtgtgtccaagagttcatctcatttcagaattgaaaaagacccttggtgccaatgatgtatcctgcactctggacggctgcttggaggtcccatgggaacaggagggagcaggtggggaacttcacaggcttctgaaacatgccagtgattgctgggggtggggaggtggaggcccacatggggtgtatgggattgtcatgagtgtgggttcatggacggaacagaatgcactttgtctccttacccagccagcctggccaagctcgtgaacaagctcagtgggaagttgtggagtgcatctgagccacagagggaccctctaaacccaggctctgacatgcatgtgagctcagccctggggggctgagattgtggtgaatttgtgtcccatctctctctctctctctctcttttttttttttttgagacagagtctagatctgttgcccaggctggaatgcataatctcagctcactgcaacctcctcctcccaggttcaagtgaatctcctgcctcagcctcccgagtagctgggactacaggcggcacatgccaccatgcccagctaatttttgtatttttaatagagatggggtttcaccatgttggccaggctggtctcgaactcctgacctcacatgatctgactgcctcagcctcccaaagtgctgggattacagatgtgagccaccaggcccagcctttgtatcccatctctaatcctaggacttagggggcatctcccaatggctacttcctgtcgccaacttggaaagggagattgtagtgacaggggccttaggtttaccaccagcaagagcttccaagatggccataatttgggggataatttttttatgcagcaatagctaactaatacacttcctagctgatctgggacagagaaactgatcaatatttacactaacttggataaatagttaaacagtcctagaaagacttctaaggccaggcacagtggctcatgcctggaatcccagcactctgggaggccaagataggtggattgcttgagcctgggagtttgagaccagcctggacaacatagcaagaccctgtctctacaaaaattttaaaaattagttgggtgtggtggaatgcacctgtagtcccagctacccgggaggcccaggtgggaggtttacttgagccgtggagatggggtggcattgaactatgattgcaccactgccctctagcccgggccacagagagagaccctgtctcaaaaacacaaactaacaaatacaaacatgagtgttagaatatttcaggatttgcaattggatgtgagggattgtagatgggcccctgaatttatttaaccagaaccaaaccaacaggcatttggtttctagtcttccatactaacagccaatgccacagggattaatcttgtacatactttttttttttttttttttttttcaaatgcaggttcctgtgggcaaatcccgcaatgggaaccctcagaatttaaagtatgtgtgtttgtcatttcaacagagggctgtccaccagggtagcctcactggtgcccctcacctttgtccgggaggtttaggagctgcttttagctccttttctgagaaccttctctcctatccttcaccctttcatcttttggctgcttatacatttctttttctttttatttatttatttatttattttttgagatggagtgtcgctctgtcaccaggctggagtgcagtggcagcatcttggctcactgtaacctccaccttgcgggttcaagcaattctcctgcctcagcctccccagtagctgggattacaggcgtccaccaccacgcccggctacttttgtatttttagtagacatggggtttcaccatgtcggccaggctgattttgaactcctgacctcaggtgatccacctgcctcggcctcccaaagtgctgggattacaagcgtgagccactgcacccggcctacatttctttttttttatttttattttttgagatggagtttcgctcttgtcacccgggctggagtgcaatggcgcgatctcggctaactgcaacctctgcctctcgggttcaagcgattctcatgcctcagcctcccgagtagctgggattacaggcgcccaccaccatgcccagctaatttttgtatttttagtaaagatgaggtttcaccatgttggccaagctggtcttgaactcctgatccttggtctcccagagtgctgggattacaggcatgagccattgcgcccagccaacatctctattaactctgattttttaagcacttattacatgccaggcatctgacacatctgatttttgacgtccgtatattttccattatacagatgaggaaactgaggctgagcgggaaggaggggcttgtcccaggcagccagactctggtgcccagatccagccactctgcccaccgccttctccaggaacattccggagctgaatcttcacccacatctatcttgtttctattggataaatgtctacaagtggaatttctgggccaaaacggatgtgccatctttaggcttttgtaacccctgcaacttcagaaaactgtaccattttatactccaagcagcagcatttatttgtgtattttccccaaggctttctttattttaattttttttttttttttgagactgagtcttgctctgtcacccgggctggagtgcagtggcaggatctcggctcactgcaacctccgcctcccgggttcaagcgattctcctgcctcagcctcccgagtagctgagatttcaggcacccgccaccatgcctggttaatttttgtgtttttagtagagatggggtttcaccatgttggccaggctggtctcgaactcctgtccttaagtgatctgcccccctcagcctcccaaagtgctgggattacaggtgtgagccaccacacgtggcctaattttttttttttaaataatagagacaaggtctcgctatgctgcccaggctgatctcaaactcctggactcaagcaatcctcctgccttggcctcccaaagtgctaggattataggagtgatccactatgtccagcctccaaatcctttctaaacactaggacttttcatgaaaagaaaaaagctatgccagttagacacacacagaaatctcatgattttattttgaatttctttgactaaattgaacttacaaataagtttattatggccaggcgtggcagtgcacacctgtaatcccagcactttgggaggctgaggcgggcagatcacttgagctcaggagttcaagaccagcctggcgaacatagtgagacctcatctctacaaaaaatacaaaattagcggccgggagtggtggctcacgcctgtcatcccagcactttgggaggctgagacaggtggattgcttgagccaaggagttttgaggccagcttgggcaatgtggtgaaacctgtctctactaaaaaataaaataaataaataaataaataaataaataaataaataaataaaatttaaaagaagctgggctgagatgggagatttacctgagcctgggaactcaaggctgcagtgagtggtgattgcaccactgcactccagcctgggtgatgggagtgagaccctgtctcaaaaaacaaaatccaaatatgttgattagccatttacatgtttgtagtttttttttttttaatttcagtgaattgcctgttcatagcttttttctacttttcaggagtgtttgcatttttcttattgatatctaataactctttatatctgaaggatatgaacgctttgtgatacaggttacagattttggggtttttttctccgcttgctgtgagccttttgggtttgtttcctagctccaaatcttaacttggtgtcaagtttcctggctgggagacaagcttttaccgacttcctctgcttgccagcaaagtcatctgctaactggatattggcagcttctctgctgtcttgcagctgcttccggagtgggttccacagggattcccgtgtgttcttggttcagcttgcagagggactttcacactccctggagaccgtttcctcccattctgtctggagttttcggcctaccccaagacaatgagatattcctgacctttccacctatttccctccaaccccaccttccgaaatacatttgctcaatacatttgcacttcataggcttctttagctgtcttccttttaccccggacgggatgtagatgttaattctggaacaattgcagctacaagaatttgtcatcctgccccttttgagaaaaacattgtttgcccttgggtctaaatccttccagatgggatgggatgtatcttgtcacctcctttttcttacttaatatgaaaagacctttcctcatcaagtccacagagtgtaaatttgtttttacctttttttttttttttttgagacggtgtctcactctgtcacccaggctggaatgcagtggtgcgattttggctcactgcaacctccacctcctgggttcaagtgattctcctgcctcggcctccgtagtagctgggattacaggcgaagcgccaccatgaccggctaattttttgtgtttttagaagagatgggggcttcaccatattgaccaagctggtctcgaactcctgacctcaagtgatccgcctgcctcagcctcccaaaatgctgggattacaggcgtgagccactgcacctggcctgtatcattcttaaaaattaagttttagcggggcatgatggctcactggtaatcccagcagtttgggaggctgaagggggaggattacttgagaccaggagtttgagaacagccggggcaacatagcgagactccatctctacaaaaaatttaaaaattagctgggcgtggttgagtgcacttgtagtcccagctacttgggaggctgaggcaggaggatcagttgagcccaggaggttgaggctgcagtgagccatgatcatgtgatcatgccactgcactctagcctgagccacagagtaagaccctctctgtgaaaataataataagctgggcgcggtggctcacgcctgtaatcccagcactttgggaggctgaggtgggcggatcaggaggtcaggagttcgagaccagcctggccaatatggtgaaaccccatctctactataaacaaaaattagccgggcgtggtggcgcgtgcctgtagtcccagctactcaggaggctgaagcaggagaatcgcttgaacccgggaggcggaggttgcagtgagccgagatcgcgccactgtactctagccggggcaatggagtgagacgctgtctcaaaaaaaaaaaaaaagaaaataataataataataataataatgttcagatgtattttttaaagtttttattgtttttaaaaatagaggcacggtcttgctatgttgcaccactgcactccagcccgggcaacaaagccagactccgtctcaaaaaaaaaaaaaaaaaagtgtgatactaagtcaatcaatttgaaaatgcggctctagagtattggaaaacaatcccttgacagcgtttccatgaaaacatggcccttgtctctggaagagcttgtgcccagaacggtccattatcatgccctggctctattttcacgccaaccctatagggtctctatgatctcattttatagatggacagactgaggctcacatatagcaagcccaaggcggggactgaatgtgacgccaggtctgtggacgtcatgacctttattctccacaaccctcaatgacatccctgtgagatccaaaaccaggatggcaaaacccacgttgcagcagaggaaactgaggctaaggtctcttgggtcccaaaccaggtcctaagtagccaagtccgcctggtggcacagcccgggttttatacatggggaaattgggcggcgcatctggcggaggtctcagtggtaggaggcgcctggaggaagcgcgggttcctaaccctaacgctacccctaacatcccttccacgcgctccgagcgctatgtgcctttaagatcggtgcgggggcggggcgtcctgggtagggctgcaggtgacgtcactccgggccttgggactcggagagcgtctggaggcggggcctggacttcacgcccggcgcgctcctcccctttaaggcgcgcggccgggcggggcccctatgacccctttaaggcgcggccagagtcctcccgcagaaaaacgacttaaaggagacgcgtggcgcgatggcggcggccccacgcgcgggccggcggcgcgggcagccgctcctggcgctgctgcttctgctgctggcgccactgccgccgggggccccgccgggcgccgacgcctacttccccgaggagcgctggagcccggagtcgcccctgcaggcgccgcgcgtgctcatcgcgctgttggcgcgaaacgcggcccacgcgttgcccaccacgctgggcgcactcgagcggctgcggcacccgcgggagcgcacggcgctatggtgagtcgagcccgctgtccccatcaggcgggtcacgcgagcccctgcttgctgtccccataggggtgggtccacgcgagcccctgcccgctgtcctcttctgggcgggtccgcgcgtgcttcctgctcgctacccccatcgggacggttctacgcatgcccctgcccgctgcccccatcgggacgggtccacgcgtgccccctgcctgctgtcctcccatggggccagacacagccctccccacaacacaagcgggaccgagttcctcctgctggctcctttggggtgggctgggcaccgcttctgcctgctggaccctactagggcagctccggcctcactaactggggctctaactccctctggggcacgtacacctccaaaggacggagcccagagcccccactggggcgttgccagaggccacatctaacagcaagcctttctgtgccggctgctgcccttaagcttgaactcagcctggctccaggccccagtcaaacccctgccctcagaccggcgtgggtggagtccaggaccagatggcccaggaggaagtggatgctttcttggtagggaatggggcagagctctgaagaaacctttgactggtgacttctcactccctgcctcagttttctcaaatggaaaatgggtccgggtgcagtggctcacgcagtaatcctagcaatttgggaggccaaggtaagcgggtcacttgagctcaggagttcgacaccagccttgccaacatggcaaaaccccgtctctagaaaaaaaatacaaaaattagccaggtgcggtggtgtgtgcctgtagtcccagctattcaggaggctgacgcaggagaatcgcttgagcccaggagttcgaggctgcagtgacctatgattgcaccactgcactccagcctgggctacagagtaagacctgcctctaaaaaaagaaaaagaaaagaaaatgagcgtattaatataattctctttttgggtttgtctctgaagattatccagttaatggatgtggagcccttgggtctggcatgggcttggctctcagtgattttattatcatgattactgtcattgctggtgttattgtcaacttaatttattgggcagaattagcttttggcactacggtcaaactaaactcccaaatgtcgcttttccttccacctgatttctcagtctggataatccaaatacacaattggtacttaacaaatgtttgttgaatgaataattgactgcagcccactgaagtggtgtggctcacaggagaagatgaaggcagggtaagggatttatgagatatactttgagatatacttttttttttctctcagacggaatcttgctctgtcgcccaggctggagtacagtgacacgatctcagctcattgcaacctccgcctccgggttcaagtgattctcctgcctcagcctcccgagtagcttgggattacaggtgcgcaccaccatgcctggctaatttttgtatttttaatagagtcagggtttcaccattgtggccaggcttgtgttgatctcctgacctcatgatctgcctgcctcggcctccctaagtgctgggattacaggcatgagccacagcgccctgctgagatatacttttttttttgatacagggttttacatctgtcgcccaggcgggagtgcagtggtgcaatcctagctcactgcaacttccccctcctgggctcaagtgattctcctgcctcagcttcttgagtaactgggactacaggcgtatgccactgcgcccagctaatttttgtattttttctagagatggggttttgccctattggccaggctggtctcgaactcccgagctcaagtgacctgcccacctcggcctcccaacatattgggattacaggcgtgagccattgcacccagctggtttctgatatatacatttcattttttaatattttttatttatttattttttgagactgagtctcgctctcgttgctgaggctggagtgcagtggcacgatctcggctcactgcaacctcctcctcccaggttcaagcgattctcctgcctcggcctcctgagtagctgggattacaggtgcccgccaccacacccagctaattttttgtgtttttagtagagatgggatttcaccatgttggccaggctaggctcaaactcctggcctcaagtgattcacccgcctcggcctcccaaagtgctggaattacaagcgtgagccaccatgcccggcctaatttttgtatttttagtagagatggggtttcgccatgttggccaggctggtctcaaactcctgacctcaggtgatacacccgcctcggcctctcaaagtgctgggatgacaggcgtgagccaccgtgcctggcctgatctatacattacaaaaattgccgtgtgcggtggctcattcctgtcatcccagcactttgggaggctgaggcaggtggatcacctgaggtcaggagttcgagagcagcctggccaacatggcgaaaccccatctctactaaaaatgcaaaaattagctgggcatggtggtgggcacctgtaatcccagctactcgggaggctgaggcaggagaattgcttggacctggtaggcggagattgcagtgaaccaagattgtgccactgcactctagcctgggtgacagagcaagactctgtctcaaaagaaaaaaaaaattaagtgacacatatttgttagtgaatgtggtttgcaagatcttagatgctcagtaataaaacagccaatcactaatgggtctttccaaaatcagcttgtttaatccttccacttcccagtaaactgggtcctgttcccacccccatgttacagatgaggaaactgacatggaaagggagaaatgggccgggcgcggtggctcacgcttgttaagtccagcactttgggaggccaaggtgggcggatcacgaggtcaggagatcgagaccagcctggccaacatggtgaaaccccgtctctactaaaaatacaaaaaaattagccgggtgtggtggcgggcgcctgtagtcccagctacttgggaggctgagacaggagaaggcgtgaacccgggaggcggagcttgcagtgagccgagatcgcgccactgcactccagcctgggcaacagagcgagactctgtctcaaaaaaaaacaaaggaaagggagaagtgtcctgtccagggatacatagctggtgggaggccagttggggatggtggtccttgacttgcctcactgctgcctggtcctgcctcagtctccccaagtacgctgcctgtcccctctccctgcagggtggctacggaccacaacatggataacacgtcaactgtgctgcgggagtggctggtggccgtgaagagtttgtaccattccgtggagtggcggccagcagaggagcccaggtgagcatctttcccctgctcctagtctgattgggctttgcctctgctcacacaccctctatggctccccattgccccagaacaattacaggccctcagtccctgcctccagcccagccaggcagcattaagctactctgagcctccctcagctttacaaataggccataatcctcttctcagacctttgcccaagccgttccctgtacctagaattctttcactccctttttcttctggggacgcccactgctttgttccctggctcactgactcagtcttggtcccagcactggctttgctgtttatctactccctaaagccctgggcagcatggactccctgcccccacccagttcctttctgggtttttgttttttttttgagacagggtctcactccctcacccaggctggagtgcagtggagtgaacacagcttactgcagcctttaactcctgggctcaagccatcctcccgcctcagcctcctgagtagctgggactacaggcacatgtaaccatgcctagctaatgtttttgtattttttgtagagatagggtctcactgtgttgcccaggctggtctcaaagtgctggcctcaagcgatcctcccacctctgcctcccaaagtgctgggatcgcaggcgtgggccactgcactggaccccactgagcttccttccttccttccctccagtgtgcctcgggctttcttccctccaggcctttgcacaggctgtacctccggccaggaacattctccccacttctctttcctcgtcgtttactttttcccatccctcagatcagcttacacgtcccctcctccaggaagctctctctgagtaccccgaaggcagctcaggccctcgctgggctttgatagtgccttgtgatgtccacatcacagctgcctccccataggtcctacccggacgaggaaggcccgaaacactggtctgactcacgctacgagcatgtcatgaagttgcgccaggcagccctgaaatcagctcgagacatgtgggctgattacatcctggtaagtttctcagccggccggatatggatcacaggcaggtctgggtatccccagggaaggcggagcagcaggatgccaggaccatccttaatgttgttttgcagaagggtaaactgaggcttagagaggggagatgagttgcttgaggtgatatggttggtcagtggaggaggagctgggattcatttgatcctcagcactaggaatgaatgggcttttctgtccccagttgtcccctgtgtttggacacttgggtcaagtccatttttatttttttatttttttgagacagagactcactctggtgcccaggctggagtgaagtgccgcaatatcggctcactgcaacctctgcctcctgggttcaagcgattcccgtgccacagcctcctgagtagctgggaccacaggcacccaccaccacgcccggctaattttttatttttatttttgtggaagccaggcatggtggctcatgcctataatcccagcactttaggaggccaaggcgggtggatcacttgaggtcaggaggtcgagaccagcctggtcaatatggtgagactccatctctactaaaaatacaaaaattagccgggcgtggtggcaggtgcctgtaatcccggctacctgggaggctgaggcaggaggatttcttgaacctaggaggcagaggttgcagtgagccgagatcgtgccactgcactccagtcactgggcgacacagtgagactccatctcataaataaatacataaataaatatttttaaaaaataacaaataaaaaatatttttgtagagacggggtcttgctatgttgcccaggctggtctccaacccctgggctcaagtgatcttcctgcctcggcctcccaaagtgctgggattacaggcatgggccaccgtgcctggccgtgtcacgtctgtttttatcaccatcatatgtaatggccaaacctttgggtcacttccaagaagcaggaggaaggggtcaggggctggggggtggtggccacattgaattgctgaggcctgacttgcacttcctcctcctgtggggacattgtctcatggggaagggaacagttgagtctttttatttttttctcgagccaagatcacgccactgcactccaacctgggccacagtatgagactctgtctcaaaaaaaaaaaaaaaaaaaaaaaaacagacttataggttgaatattactattattttttaatttgtataaacttatggagcacaagtgtaattctgttacatgcatagattgtgaagtggtgaagtcagagattttggggcgtccatcccctaaataatatacattgaacccattacacagttttctatgatcaaccccaaatgttatttcagccttcatacttttctatattctcctgattttcttttttcttgttttttgagacagagtctctgttgcccaggttggagtgcagtggcacaatctcggctcactgcagcctcctcctcctgggttcaagcaattcttctgcctcagcctcctgggtagctgggattacaggcccccgccatcatgcctggctaatttttgtaattttagtagagacggggtttcgccatgttggccaggctggtctctaaagtcctgacctcaggtgatccagctgcctcggcctcccaaagtgctgggattataggtgtgagccaccacatccagcccatctcttaaaacaaacaaacaaaaagcagaaaagaaaaagcaaagagtcaagtgagcaaagtgattacgatgcagtggtggctagaggtccaactacacaggccagtggaggcacttggtgtctacttggaggggaatggggagccatggagggtgtgtgagcaggggaggtctgtgttctgatttgagattttcagaagcctctgtggaccaggcgcggtggctcatgcctctaaattcagtactttgagtggctgaggcaagtggattgtttgacttcaggagtttgagaccagcctggtcaacatggtgaaaccctgtttctaccaaaatataaacattagcttggcatggtgatgcgcgcctgtaaccccagctacttgggaggctgaggcaggagaatgtcttgaacccgggaggcagaggttgcagtgagctgagattgcaccactgcgctccagcctgggcgacagagtgagactatgtctcaaaaaaaaaaagccacacactagcaggaagctggagtagaggcccaagcagggtatcagcgattgatggacaggcctgcatggggtgggggccgtggagaaaggcagggggttcaggatgcgtcacgaggtgaaggagacaggttctgctttgacactggatgtgaaggtgccagggagagaggaacggggacagtgccacatctagggaggacggatggagctcctgaggggaccctttcgcttggtgccttatcagaccattttataggtgaggaaacaggctgacggaggggacatcttgcctggtggggtgtcagaactggcaaggaggcagagaggtggatctggagccttccagagccttctgacacaaagctgccttgtcctgcctctaggattttgcttttgtggtttgaggttgcctggctttagcttttttttccctcagcaaaccggggtggaactcaaagtgctggttcaaaactcaaagtggcttttgacacaaaataatattttcgtgtttctttttttttttttttttttttgagacagtgtctcactctgtcgcccaggctggagtgcagtggcgcgatcttggctcactgcagcctccacctcctggggtcaagtgactctcctgcttcggcctcccaagtagctgggactacagatgcttgccaccatgcccggctatttttttttttgtgacggagtctcactctgtcgcccaggctggagtgcagtggtgcgatctcagctcactgcaagctctgcctcccaggttcatgccattttcctgcctcagcctcctgaatagctgggactacaggcgcccgccacaacacccggctaattttttgtatttttagtagagacagggtttcaccgtgttggccagcatggtctcgatctcctgacctcgtgatccacccggcttggcctcccaaagtgctgggattacaggcgtgagccagcgcgcctggcccgactaattttttttgtatttttgtagagacagggtttcactatgctgaccaggctgatctcgaactcctgacttcaggtgatccacccacctcgtcctcccaaagtactactgggattaccggtgtgagccactgcgcctggtcacaaaattatatttttgtaactggggactttggaacccatattggaatgtgaaatagtttgtctaatgttttaaaatgattgtttgaaggtccccctttctctctctttttacaaaagctatggatgttacttgcaggtaaaaaaaataaataaaaatatacgagctgggtgtgtctcacgcctgtaatcccagtgcttcaggaggccaatgtgggaggatcatttgaggtcaggagttcaaaaccagcctgggcaacatagtgagaccccccccatctctacaaaaactaacaaaaaaaaaaaattagccaggtgtactggtttgtgtctgtagtcccagctaattgggaggctgaggtgggaggattgcttgagcccaggagtaggaggctgcaatcagccatgattgtgtcactgtactccagcttgggtgacagagcgagaccctttcttaagcttcgtatatgtgtatgtgtgtgtgtatgtgtgtgcgtgtgtgtatacatatatacatatatacgtgtatatgtatatatatctatatatgtatataaacatatatacgtgtgtgtgtgtataatatagatatacatatgaaacaagaaagaaaaacatctactttttttttttttttttttttgagatggagtctcattttgtcacccaggctagagtgcagtggcgccatctcggctcactgcaacctctgccttctgggttcaagcaattttcctgcctcagcctccggagtacctgggattacaggtgcccgccaccatgcctggctaagtttttgtatttttagtggagatggggtttcgccatgttggccaggctggtcttgaactcctgacctcaagtgatcacctgcctcagcctcccaaagtgctaggattgcaggcgtgagccaccgcccctggccagcatctaaattttaattgtatctcctggagagattcactttctcctctttcttgtttgttttaattgaagtcagttcacatatatatttatttgttttgcaaccaccacctctaattctagaacattttcattccccagaaagaaaaccctattcccatcagcagtcactccccaactccccattcctctcccctaggctctggcagccactaatctgcttcctgtctacggatttgtcaatggaatgtcacactatatggcgtttcgtgtctggtttctctcactcagcattgagttttcagggttcattacagcctggatcagtgcttccttcctttgtatggctgactcttattccgttgtctgggtggaccacgttatgttgatctcctcatccgttgatggacacacttcagtcacttccaccttttttggctgttgagactttttttttgagacagagtgttgctctgtcgcgcaggtttgcagtgcagtggcacgatctcggctcactgcaacctccatctcctgggttcaagcgattctcctgcgttagtctcccgagtagctgaaattacaggcatgtgtcaccatgcccggctaattatttttatttatttttatttttagtagagacggggtttcaccgtgttgcccaggctggtcttggactcttgacctcatgtgatctgcctgccttggcatcccaaagtgctaggattacaggtgtgagccactgcacccggcctggctgttgggattctgacatgaacatgagcgtacaaagacctgtttgaattatctgggcatggtggtgcgcgcctgtatttaatcccagctactcaggaggctgaggcaggagaatcatctgaacctaggaggtggaggttgcagtgagccgagatcacaccactgcacttcagcctgggtgactgagcaagactctgtctcaaaaacaaacaaacaaacaaagaagctgtttgagtcctttctttcaattctcttggttcatacctaggaatggaattcctggatcatgtagtaattctatgtttagctttttgaggaactgccacagtgatctggctgtttgttctgcattaatattcaaaggtcacagattcaaacatccagagggaccggatggggtgtgtaacatgaccacagggcttgtcctaagacccagccacctcccctctgcaactgaaggttgccatgtggaaatggtattctcacgttgccaggggatactggaattctagtttttgttgttgttcatggcagttaatccaaatattctaaacgatactgcctgggtaacagaaagcatctctgtggaccagcagtaaaagaaaaaaaatccagaccgggcacaatggctcacacctgtaatcccagcactttgggaggccgaggcaggcgtatcacttgaaatcaagagttcgagaccagcctggccaacctggtgaaaccccatctctaccaaaaaatacaaaaattagcctgacgtggtggcatgtgtctgtaatcccagctacttgggagactcagggagaattgcttgaacatgggaggtggaggttgcagtgagccgagatcacgccgctgcactccagcctatgcaacaggagacgccatctcaaaaaaacaaaaacaaaaacaaaaaaccttctggtagttctgtgatatatcatgacttctgtgtctttacatcctggtagagggggaacgtccggacctaatcattttctatgtgtgattttatatatatatatttaattttagtctaggtgcagtggctcagacctgtaatctcagaactattgtaggccatggggaggatcgctttgagcccaggagttcaaaaccaccctaggcaatgtagagggatcctatctctacaaacataaaaataaaaatgaaaacattatctaggcatggtgacgtgtgcctgtacgctcagctacttgagaggctgagatgagaggatcacttgagcccagaaactccaggctgcagtgggctacgattacaccattgcacttcagcctgagtgacacagcaagatgctatccctttaaaaaataaaaaatgaagaaaaagtaaaatagtaggccaggcatggtggctcatgcctgtaatcccagcactttgagaggccgaggtggacgaatcacatgaggtcaggagtttaaaaccagcctggccaacatgatggtaccctgtctctattaaaaatacaaaaagttacccgggtgtgatggtgcacggctgtagtcgcagctactcgggaggctgagacaggagaatcgcttgaacccaggaggcggaggttgcagcgagctgagaccataccactgcactccagcctgggtgacagagcgagactccgtctcaaaaaaaaaaaggttttgctaccttcttgctcattggttgttcatttatttctcagggctatctcagtgcctagaattttctttgaaggaactgaagacctttgctttatttccatgatccaggggatcctgcaggcccccaaaacggggtccctgcttcatttcatccggtgtagggggtgcttccagaggtctttgccagacccccagggcactggcctttgccccagctgttctgaatggtagcctgacctggcagcccatgctgatgctttgtggggtgttctgcagtttgtagatgcggacaacctgatcctcaaccctgacacactgagcctgctcatcgctgagaacaagacggtggtcgcccccatgctggattcccgggctgcgtactccaacttctggtgtggaatgacttcccaggtagagtgagggcctggggactgtggggactgggctgagcaggggggtgccgtggctagagtgtaacttactgtcacacaacctcgtggtgtgtgttttacaaaaatcatcatggaagctgggcacggtggctcacacctgtaaccccagcactttgggagactgcggcaggcgggttgcctgagctcaggagtttgagaccatcctgggcaacatggtgaaaccccatctctactaaaaaaaaaaaaaattacagaaattagccgggtatggtggcacatgcctgtcctcccagctgctcgggaggctgaagcatgagaatcacttgaacccaggaggcggaagttgcagtgagccgagatcacgccactgcactccagcctgggtgacggagtgagacttggtctcaaaaacaaaacaaaacaaaaactcattatggtaatctttaaacagccctctgaggccagacaggagggaagaatagagggtccttgattgtcccccaccatgctattccagaggtggaaacagaaacacagagaggaagtgacttgcctaaagtcacacagctagcaagtggtggtgtcaggatgggacttcaggcatggcttgatccaggtgtttggataactgtctttctccatcctttgggtgggttcattctcagacagcttgagagtgatcccagcagcgtctagccatcatccattctgattgggccattgctagtctcctctccacactacctctgaactcattactgaagctgggaaaatacaaggctctttcttattggccatgcctggccacaggtcccacactgggcttgagtctggggtcctgggaccacaggcgcacactgctgtgcctggctgtctgtctggtcctgtttcatgccgcccactatcacgggtctccatcctcacctttcaagacccctacgcggaactctcgctctctccccacagggctactacaagcgcacacctgcctacatccctatccgcaagcgagaccgccggggctgctttgcagttcccatggtgcactcgaccttcctgatcgacctgcggaaggcggcgtccaggaacctggccttctacccacctcaccctgactacacctggtcctttgacgacatcatcgtctttgccttctcctgcaagcaggcaggtacgtacatgaggggtctgccatcgcaggggcatctgcctggttctttgggttttgcactaagccagttcagaacacactgaagattcacagaacccaaacaatgcagcgcagggctgacttcaggtgcagctgtatctaggtgttcagataatgtctccaggaccccgtttctctccagccctggctttgctggttagcttcattccctagctctttaagatctattggttggtcaggcagagtggcttatgcctgtaatcccaacaatttggcaggctaaggcgggtggatcatttgaggtcaggagtttgagaccagcctggccaacatggtgaaaccccatctctactaaaaatacaaaaattagccggacgtggtggtgctactggggaggctgaggcgggaggatcacttgaatatgggaggcggaagttgcagtgagccgagatcatgccactgcactccagcctgggcaacaaagtaagaatccttctcaagaaaaaaatacctattgattgcatgttactattattttttaatttgtgtaaatttatggagcacaagtgtaattttgtcacgtgcatagattgtgaagtggtgagtcaagagattttagggcatccatccccaaataatatacattgaacccgttacacaattttccatgatcaaccccaaatgttatttcaatcttcatacttttctatattctcccaattttcttttgttttttttttttgaagtagagtcttgctctgtcacctaggctagagtgcagtggtgcgatctcggctcactgcaacctctgcctcctggttcaagagattctcctgcctcagcctcccaagtagctgggattacaggcatacgccaccatgtctggctcatttttatatttatagtagagacagggtttccccaggttggccaggctggtctcaaactcctgaccccaggtgatccgcccacctcggcctcccaaagtgccgggattacaggagggagccactgcacctgggccattctcctaattttctacagttgagcatatattaattgtttaattgggaaaacaaatatttaaagagacagcacagcctcatgttgacttgttgtttactggaaaccagaggttggcaaactgacctgcaggccaaacctggcccactaattactttttttttttttttttttttgagacggagtctcgctctgtcgcccaggctggagtgcagtggcccgatcttggctcactgtaagctccgcctcctgggttcacgccattctcctgcctcagctttccgcgtagctgggactacaggcaccagccaccaggcccggctaatttttgtatttttagtagagacggggtttcactgtgttagccaggatggtcttgatctcttgaccttgtgatctgcccacctcggcctcccagagtgctgggattacaggcgtgagccaccgcgcctggccccactaattacttttatatggccacaagctaacaacaacttttatattttatttttatttttttagagacacagtcttactctgtcacccagcctggagtgcagtggtgtgatcgtagctcactgcagcctcaacctcctgggctcaagcaatcctctcatctcagcctccagactggctggggctataggcacctgcctacatgcccagctaattgaaaaaaaaaatgtttttgtagagatggggtcttgctatgttgcccagactagacttgaactcctggccttaagtgatccttcccacctcagcctcccaaagcgctaggaatacaaacgtgagctacggtgcctggccaacaatttttacatttttattatttatttatttatttgacacagggtctccctccgttgcccaggctggagtacagtggcatgatctcagctcactgcaacctccacctcccaggttcaattgattctcctgccttagcctccctagtagctgggactacaggtgtgcaccaccacgcctggctaatttttgtatttttagtagagatggggttttgcctgttggccaggctggtctcgaactcctgacctcaggtgattcacccgcctcagcctcacaaaatgctgggattacgggcatgagccaccacacccggccaatttttacatttttaaatcactggggaaaagaatcaaaagaagaagaatattgtgacacatgaaaactgtatgaaattcagatttcattgcccatcaataaagtgtcatcagtacccagccaagcccattcatttaagtgtcgtctgtagctgctttcaagtgccacaggcagaacagagtcattgagatagaaaccgtctggcacacaagcctaaaatacttaccacctggccctttatagaagaaattgaccaattaaaattaaaagaggccgggtgtagtggctcatgcctgtaatcccagcactttgggagggtgaggtgggtggatcacatgaggtcaagagtttgaggccagcctggccaacatggtgaaacccgtctctgctaaaaatacaaaaattggctgggcatggtggtgggtgcctgtagtcccagctacttgggaggctgaggcacaagaattgtttgaacccaggaggcagtgaacggagatcacaccactgcaatccagcctgggcgacagagcgagactctgtctcaaaaaaaataaataaattaaattaaaagagcatcattgagttttttagtctaaaaaagatacacacttggctgggctcagtggatcacttgaggtcaggatttcgagaccagcctggccaacgtggtgaaaccccacctctactaaaaaaaaatacagaaattagctgggtgtggtggcgggtgcctgtaatcccagctacttgggaggctgaggcaggagaattgcttgaaccccagaggcggaggttgcagtgagccgaggtggcaccactgaactccagcctgggcgacagaacgagactctgtctcaaaaaaaaagatacacactcatcaaaatttaaaccatccagaaaaggatagatgtagaaggaagtaacttaactcacattttgtcaaactttcctttttgtgcctcaacatgcatttttactgttttttttttgggtttgtttttgagacagggccttgccctgttgcctaagctggagtgcagtgtgccatcatagctcatggcagcctcaagtctcctgggctcaagtgatcctcctgccacagcctcccgaggagctgggaccataggcaggtaccaccattcccagctaattttaaaattatttgtagagccgggcgtggtggctcatacctgtaatcccagcacttcaggaggccaagacaggtggatcgcgaggtcaggagatcgagaccatcctggctaacatgatgaaaccccgtctctacaaatacaaaaaattagccaggcatggtggcatgtgcctgtagtctcagctactagggaggctgaggcaggagaatcacttgaacccgggaggcggaggttgcagtgagccaaggtagtgccactgcactccagcctgggagagtgagactctgtcttaaaaaaaaaaaaaagttgtttgtagatataaggtcttgctctgttgcccaggctggtctcagacacctgacctcaagcgatcctcctgcgttggcctcctgaagccgtgggatggaaggcatgagccactgggcctcgcctgtttttacatttgtctgttgcttccctgcccactgcagaggttcagatgtatgtgtgcaacaaggaggagtacggattcttgccagtgccattgcgcgcccacagcaccctccaggatgaggccgagagcttcatgcatgtgcagctggaggtcatgggtgagtctgcctgcacaccgccctgggaggtgccaggttgcctccctttcactgatgtctcaaatccgtcccatgagcactgactgagtgccaggcagatgcaagtccctgtggggggtgctgggtgcaacggcacgtgtgaacgaggtggagggttgtgtctgctctcacagagtgctggtttgcaggtagctgtacacagcatgcttggggttgtcgggtgggcttcctggaggaggtggcattaaggggcaggttgagtaggagttcaccataaaggggattgcagcaggaggtggtagtgtgggcaaaggccgggaggctggaagggacgtgaacctggggaacaggcaaggtcagtgatcccctggggctggtatccagggccagggtggatggcctcagagaccaggctgaggaagggaccttccccctgaggacagtcaggagctatagaggacatgaaaactgagaggacagcaagttttcactaaagaactgcatgtataggccaggcatggtgactcaaacctgtaattccagcactttgggaggccaaagtaagaggattgcttgagcctaggagttcaagatcagcctgggcaacatagtgagaccccatctctatattaaaaaaaattttggccgggtgcggtggctcatgcctgtaatcctaacacttcgggaggacgagacgggcggatcacaaggtcaaaagatggagaccatactgaccaacatggtgaaaccctgtctctactaaaaatacaaaaaaaattagctgggtgtggtagcgaatgcctatagtcccagctacttgggaggctgaggcaggagaatcacttgaacctgggaggcggaggttgcagtgagccgagatcgtgccactgcacttcagcctggcaacagagtgaaactccgtctcaaaaaaaaaaatttttttttaattagtccgacatggtggcacatgcctgtattctagctactcaggaggctgaggtgggagaatcctttgagcccaggagttggaggccgcagtgagccataatcgtgccactgcactacagcctgggcaatagagtaagtctgtctcaaaaataataataataaaaaataattatcccagctctttgggaggccaaggtgggcggatccctggaacccagtagtttgagaatatcgtgggcaacatggtgaaaccttgtctttaccaaaaaaaaataacaaaaattagccaggcgtgatggcacacacctgtggtcccagctactcgggaggctgaggcgagaggatcccttgagcccaggaggtcgaagctgcagtgagccaagattgcttcactgcactccagcctgggcagcagagccagaccctgtatcaataaataaataaataaaactttaaaaaaatccatgaactatgaaaccagcagccgtccctctaaaactggaggagcacgcagggctgagctgtaattgaggttgtctagggatgatgctcccatctcagccattgctaatgtgggcctcgccctgcactgggcgcagaaagccctgccaaagccactgccattcccaccactgcgtagatggagactgggtgggaggggtgaggcctctgtcccggggctcagtttccccagccttaccgatttctgaacgagtctatctgcggctccccctggtggctcaagatggaatagcaccctgccctttgtgttttggggagactttttttttttttttgagacggtgtctcactttgtcacccaggctggaatgcagtggcgcattctgggctcacttgaaacctccgcctcctgggttcaagcgattcccctgcctcagcctcccgagtagttgggattacaggtacctgccaccacacctggcaaattttgtatttttagtagagacggggtttcaccatgttagccaggctggcctcgaactcctgtcctcaggtgatccacctgcctcggcctcccagaatgctgggattacaggcgtgtgtcactgcgcctggcctgggggagacttttgagtctttttgaggtgacacctggagactgcacaatcactggggcaggccccccacaacacccaagagtggcatacttaggtgtccaggtcccacccggctacagttgggggtggtgggtctccatttatcaccaactcccatcagaaacgggcctgagaagcgtctctgtggctaccagagttttcccagtttaagttctcacatatatttgtgttgtcatttcctttttttgagacagagtctcgctgttacccaggctggaatgcagtggcaaaatcacagctcactgcagcctcaacctccttgactcaagcgatccttccacctcagcctcctaagtagctgagaccacaggtgcatgccactaccatgctcagctaatttgttaatttaggtttttggtttttttggtttttatttttttgagatggagtcttgcactgtcgcctgggctggagtgcaatggtgcgatcttggctcactgcaacctccgcctcccaggttcaagtgattctgccccaccttcccaagtagctgagtttaacaggcgcttgccaccacgcctggctaattttttgtatttttatttttattattttttgtttgtttgttttttttgagacggagtctcgctctgtctcccaggctggagtgcagtggcccgatctcggctcactgcaagctccgcttcctgggttcacgccattctcctgcctcagcctcccgagtagctgggactacaggcgcctgctaccacatccggctaattttttgtatttttattggagatggggtttcactgtgttaacctggatggcctcgatctcctgaccttgtgagccacctgcctcggcctcccaaagtgctgggattacaggcatgagccactgcgcccagctagttttttgtatttttagtggggacagggtttcagtatgttggccaggctggtctcgaactcctgacctcatgatctgcccacctcagcctcccaaagtgctgggattacaggcatgaaccactgtgcccggccttcttttttgctttttttggagatggagtctctgtcacccaggctggagtgcagtgtcaccatcatagctcgctgcagccttgaactcctgggcaatccttctgcctcagcctcccaaggagctacagatttccccttttaaaagcacacaagccatgtggattagggcccaccctaatgacctcattttaactcgatgacctctgtacacaaccctgtgtccaaataggatcatatcctggggtactggtggttggcactggggagacacagttcaccccatgacatagtgcatgatctcatgacatctctttgtgaaacctctcagtggcttattggcccattttatagatgaggaaagctgaggcccaggccaatcaagaatatacagcatgccatcatttcttggttcattctacaagcaattactgagtgcctgctgtgtgccaagcccctgtgttgggcactaggggcccagtgtgagcagacatacctggtgtccttcccaaagggctcacaacagacaggcacagggccagggggttagggcagcaaggatgcgagctttggtggtgcaagtccaggtgctgctggggcccagaggaggtgcctggctcagcctagggaggtgggagtggggagggtgacccccatgcccagggcatcatagctgagaagtaacgttacagagcagggaaaggaagggtatttcaagcagggatccagcatgtgcaaaggccctgaggtaggaatgggggttctttgggttggcaggggcatagaggtggggctggggggtagagtgaagctggagcatggggcgtggccagggcttagaggcagggttgggggcggagtgaagctggagcccagggcgtggccacggctgagagtcggggctgggagcagggtgaagctggggcctggggtgtgaccaggacttagaagcggggctgggggtcggagcgaagctgttgcatggccagggtttaaaggtggggctgggggggtgcagggtgaagttggagcctggggcatggccagggcttagaggcaaggctgggggaggctgtggggtgaagctggggcctggggcgtggccagggctgagtggtgcggctggggggcaggttgaagctgtagcctggggtgtggccagggcttagaggcggggctaagggcagggtgaggctgggacctggggcgagtccagggttgagtagcggggccttgggcgcggtgaagctggggcctggggtgtggccagggctgagaggcaggactgggggcggggtgaagctggggcctggggtgtggccagggctttgggctgctgtgcagggttcaaatgacatgggaggggctcctagagggcagcgctgatgtgggcggagccaggtcgactttgtgggccgagccagtctgactgggagccatggagtgggtggggaaagcgtgttggagagaggctggaggctccttaccccagcgactcctcaacgtctgtgccccacagtgaagcacccgcccgcagagccctcccgcttcatctcggctcccaccaagacaccggacaagatgggcttcgacgaggtgagctgggccttccctggaggcggggcgggggctggagggcccttgtttgcaggggctgatctggctggggactctccgggctgcaggtcttcatgatcaacctgaggcggcggcaggaccggcgggagcgcatgctgcgggcgctgcaggcacaggagatcgagtgccggctggtggaggccgtggacggcaagtgagtccgaggcctgggggtgggggggcgggtccgcacgtggatgtgggtgtagacctcgctggtagacggcaagtgattcagatgggggcgggcgtggtgtccaaacagatgtagacctcgtcagtgggcgtcctgaaggggaagtgaatgggaccctggggaaggggcagatcctcacagttgtagaccatggaaggcaagtgagtcctgacccaggggaatgggtaggtttgcatgctgccagtgtagactggtggggactgtggaggggtaagtcagtcagaccccaggagaggaggagagcaggtttgcccgcgagtgtataccatgtgcaggtgagtgaggccccatgtgcccggaaggggtgccagtgctacaagaggtggaccagctgctcaacgccgcagggggtggtggaatggccggggatggcagaatggcaggcagggtgaaccttcttcgtgaccctctcctcctcctctccagagccatgaacaccagccaggtggaggcgctggggatccagatgctgcctggctaccgggacccctaccacggccggcccctcaccaagggtgagctgggctgcttcctgagccactacaacatctggaaggaggtgtgtcctgagtgatgggcggggccagagttatgactctagatctcatcggagatttggacgggaaaggggttgaaagagttccccaaagccccggctaggcatccagcctcagccatgggacccatggcctctctttagtgaatgatgcgccacaccagctgtatcacccccaggtgtacctgccatccttccattgcgcaaatgtggaaactgagcctgggggtaggggtgagcccttttgagcagcaggtggtgtctggggcctgggacctgtaaacaaatcctcattactcccagcctggtctctgtgcttgatgtttagtactagaagtcatggccacagagccactttaaaccagcacctgcccagtgctgctgggggcactcaccagcccaggcatcctcatccaccctcagagggagaggctgtgattggaggagggtgtctgactaggcttcgaacttgggccatcagggccgggcatggtggcgcacacctgtggtcccaactatttgggaggctaaagtgggagagtggcttgagcccaggagttaaggctgcagtcagccaagatcgtgccactgcactgcagactggacagcagagcaaaaccgtgtctcagaaaaaagaaaaatggctgggcgtggtggctcatgcctgtaatctcagcactttgggaggccgaggcaggcggatcaccttaggtcaggagttcaagaccagcctggccaacatggtgaaacctagactctactaaaaatacaaaaattatctgggtgtggtggtgggcacctgtaatccctctacttgggagactgaggcaggagaatcacttgaacccaggaggcagaggttgcagtgggctgaaatcatgccattgcactccagcctgggcgacaagagtgacactccatctcaaaaaaagaaaaataaaatccgggcgtagtggcacatgcctgtaatcccagctgctcaggaggctgaggcagaattacttgaacctgggaggcggaggttgcagttgagatcgttccactgcactccagcctgggcgacagggcgagactccgtctcaaaaaaaaaaaaaaagaaaaagaaaagaaaaacttgttatcgaatgtgaagccaaatgggggtgtgcggctgcaaggcgggaggtgcatgaggcgtgggcatttgaggggctgggaggcctttctcttctgagatccattatggacggcagagggcagaggtttggatgtccagatgtccctggagctaggagaggcagggagatgcactggcttctctacgggtctttcaaaccttctcaaagcaaagctctgtgctttagggtcaggcctggccttggcctccctgtgatgtggcggggcttcctccctcaggtggtggaccgggggctgcagaaatcgcttgtgtttgaggatgacctgcgttttgagatcttcttcaagagacgtctgatgaacctcatgcgggatgtggagcgggagggcctggactgggacctcatgtgagtgggggtctgaggatggggtgaagctggggcctggggcaaggccaggacttagaggtgggggtgggggcagggtggagctgggacctggggatgggtcatggcttagaggcggggcttgaaggtggggtggaactggagcctaggtacatggccagggcttagaggtggggctgggaggcggagtggagctgaatcctacgggcgtggccacagcgctgcagctgagcctagagcctgtatgtctgggtgtggtcagggtggcaggcgtggccaacccttggaagcgtagcaggagggctcacgtggttcctgggcctgaaggcactgtcagggctgtagcctatagggaagggcgttggaaggatcacccagaactcaagggacctggccggaagcctgcaggcttggtcaaggcttagagacttgactgaggcctgtggaggtggatgtggctaaaatttgaccgggcagcctgtgggcgtggctgaagagcatgggggtgtggtcagagctggaggtgtggccgaagagtgtgggggcgtggccagggcgcctggtcttagacaagcccctggatgggagtgccaccaacatgtttccagcactggagccgtccttctcttctgtaagtgggctggtttgtcctctcccttcctccatctcttttttcccttccatgtgcagtgccctaatctgcattctgggaacactgccccatgtgaatagtaactgcacccctccattcctgactgcccccccatcagggcacctcgcccacctccacccccactgtcctctgaactcagagcagcttcagcctcagagaacgtctgcgtgatcctgctctccccagctccagatcctccatggctccctcacgccctttggaaaaactcactcttctcccccatgaccgccagacccctgggctcctgcattcactccatccagtcacagagctctgcaaacatgctgagcctgctcccatcccaggacctgacggggtaactagatccctggctttctgggcaagctccctccggagggcgggaggagagtgacaggcccgatcttgcaccccagctatgtgggccggaagcggatgcaggtggagcaccccgagaaggctgtgcctcgcgtgaggaacctggtggaggccgactattcctactggaccctggcctacgtgatctccctgcaaggcgcccgcaaactgctggctgctgagccgctctccaagatgctgcctgtggacgagttcctgcccgtcatgttcgacaaacacccagtgtgagaggggcaggcggctgctgggctggggtttcacggtgggtctgtcctgggagaatggggatgtgagactcacggcctccgagaagatgtctcttcttttgcctacttctccctccgtttgccccctcgcagatctgtctccatttgtatcccctgcacacttacgttttaatctgtccccgctgacttcttcacccccaatttttcctccagctgtcccgtcccctgaagccattgctgcccctcactcccctcctcctccccccaggtccgagtacaaggcccacttctccctccgcaacctgcatgccttctctgtggagccgctgctcatctaccccacacactacacaggagacgatggctatgtgagtgacaccgagacctcagtcgtatggaacaatgagcacgtcaagaccgactgggaccgcgccaagtcccagaagatgcgggagcagcaggcactgagccgtgaggccaagaactcggacgtgctccagtccccactggacagtgctgcccgggatgaactctgaggggtagcagccagaaagccaaagcagccatcggtggcccaggctccacgtgcttactgaggacatcaggtccacctctggaccccttggcaggccacagagggctctcgtgtggggtggtgtccagccagctcttgctaagcaatcacgtgcacacaggcagcattaatggagtgcctactgcatgccagcaacagggcttggccctggggaattgggaggaaccaagccctcttcatctgttcatgtgcccagcatttattaagcacctgctgtatgcaaggttcccatgttacggcagtgaatgaggcataattgttccctccatcagcgattgattcagtcatcaagcagttactgatcagattaagaatcaggcactagtgatacacattcatttttaaaattcattcaaggatttattgagtgcctactgtgtgttgggtgccattccaggctctgggatttttttttttttttttttaagagtagagtctgtctctgtcacccaggctggagtgcagtggtgtgacggctcactgcagcctgcgcctcccagcgtccagcaattcttgtttctcggcctcccaagtagctgggactataggtgcgtgccatcacatctggctagtttttgtatttttagtagagacggggtttcaccatgttggccaggctggtctcgaactcctgacctcaagtgatctgcccgccttggccacccaaagtgctagggttacaggcatgagccactgtgcccagcccaggctctgggaatattgagataaataagatgcttctatccatttattcaagcacatattggtcacctactgtgtgcctggcactcatgtcacaaagataagttcctgattcggtacacttactgagcacctgctgtgtgcagggagctgagctatgggatgggaatgggagtaaacaaggtactttttacttttttctttttttcctcactgctagacggtgtgggaacttctcactcattggcttctttcccacacacctgaagagcactgactgtgtgccgggcactagtgatacaaaagagtgtgacagttgttcagtctgcattttcgatcatgggctacatgccgagtgctggggcacagagatgaacaagatcggttccttcacttcttcatgccacaagtgtttattgagcacctgtgtgccaggcctcacagactcccagttgggttgaagaatggttgactgagtttgattcttcctgtaccctcggtcgtctgagctgtgtgcagacaacatccccccaccacccaagagggagggtagctcttccgccaccaggggcaagcacaggtcctggtggccccacgccacatgttagcccccctggagggggcgccagttggagacgggggctgggtgtccctggcccactcccggtcccctgtgctttacctccttgcccttgtgtctcaggtgtggtccctgcctgcttgatgaagttgctctgttcaagcctttggtgggatcatgtgtttgggggcttttaggggacccagctgcactggggcactgcccgtggcctgggtaggacatttcccagcaagggctggaggagttgccgtgccttcagcctgaatcgaatgtcagaaccagccagcggtgcttcaccctcttggggataacttgcttagttttttaataaatgttcctggttggttttcacagcagtttgtgggattttgctcggcaccaaaacactgcccacgttccccacccctggatggccgacaagatttgggaggaaaccagggcaggtgcagtagggaagctgcccagtggggcctggcatggtggctcatgcctgtaatcccggtgctttgggaggctaaggtgggcggatcacttgaggtcaggaattcaagaccagcctggccaacatggtgaaaccccctctctattaaaagtacaaaaattagcctagtgtagtggggcggggtggcggggggggggtacctgtaatcctcgctacttgggaggctgaggcaggagaatcgcttgaacctgggaggtggaggttgcagtgacccaagattgagccactgccctccagcctgggcggcagagcaagacacaatcaaaccaaaaaaaaaaaaaaaaagctggccagtggagctactgtggggtgagggtgtggtaagagccctgtgtcccctcatgccataaaacttcccccaaacaggcgggggaccgacagctctgtcttgagtcaacttcaggatccttccacatgacttcgaataaagaggggctgtcgtgctttgagtccccctaaaacagacctcaacatgaggattagggctgggcatggtggttcacgcctgtaatcccagcactttgggaggccaaggtgggtggatcacctgaggtcaggagttcgagaccagcctgatcaataagatgaaatcccgtctctactaaaaatgcaaaaagcagccaggcatggtggtgtgtgacagtagtcccagctacttgggaggctgaggcaggagaatcgcttgaacgcaggaggtggaggttgcagtgagctgaaatcttgccactgcactccagcctgggcaacagaatgagactccatctcaaaaaaaaaaaaggattaggctgggtgaggtggctcactcctataatcccaatgctttgggaggttgaggaggtgagaggattgcttgaggtcaggagctcaagaccagcttgggcaacagagtgagaccctcgtctctacaaaaaaaattgagaaattagttgggcatggtagggcacacctgtaatctggctactcaggaggctgaagcaggagtatctcttgagtctaggaggttgaggctgcagtgaaccatgatcacaccactgcactccagcctgggcaacagagcaagaccctgtttctataaaacaaaaccagaaaacttccctgaaatagcccagggacaggtggccaacttcattctatcttggatcaaccacaggatcgtcgcagatgacttcaaatgaggaggggctgtcatggtttgggtcccctgaaacagactccaagatgaggattgaagggcacttacgttatcagtgaccccaggaacttgctgtggagcagtagggaagtgagacaagaagggaaagagtggtcccaccccagggagagggggctggacattacaacatgcccagttgcatttggattttctgggtcaaatgcttacaaatcctctggattattacacctttagggtgtgcaagaatatacccgagacttttataaactaacacaggggccaggcgcggtggctcacacctgtaatcccagcactttgggaggccgaggctggtggatcatgaggtcaggagttcgagaccagcctggccaatatggtgaaaccccgtctctactaaaaatacagaaaaattagctgggcatggtggtgagcgcctgtagtcccagctacttggaggctgaggcagaagaatcacttgaacctgggaggcggaggttgtagtgagccgagatcacgccactgcactccagcctgggcgacagagcaacactcttgtctcaaaaaacaaaaaacaaacaacaacaaaaaaccctaacactgatggtgttcaatcagtgtggaaaaaatcagaacttacagctaagcaaattgacaaagcaaaaattaaatcacaccttttcagacacaactaacattttcaaaaactttccagccttccttatttgcatggtgtaaatatatatgcattttttaaaaaaggaggaccatgttacctaagctactgcaacttgccgttttatttttcgtggaatgcacttttattttctaagcatgggatcaaactgtacctattttttaaaaaacaacttttatttttaaatttaacaactattgtggacctcctttccaaaatagggttaacatctacgagctctttttggattgttatggaaaatattccctgctgtttcctgcagtggatagcattatacaatacatctttcctactggattttttgtttttttgtgtttttttgtttgttttgttttgctttttgagacggagtcacactctgtcacccaggctggagagcagtgatacgatcttgactcactgcaacctccgcctcctgggttcaagcaattctcctgcctcagcctcctgagtaatagattacaggcgcccgcaccacacctggagaatttttgtatttttagtagagatggggtttcaccatgttggccaggctggtcttgaactcctgactacaagtgatccacccgccttggctcccaaagtgctgggattgcaggcgtgagccactgcacctggcttcctactggattttaaaatttcagttgggtaaattgagacaggtgggattcctggattaacctggatgtgcacttcaggtttcagtagaggctatcatattcctttttcttattgaatcctaactattcatcatctattggccagagtgaattatccatgtttattaaacagtcccttctgtgaaacatttttttttctttgaggcagagtctcactctgtcgcccaggctggagtgtagtggcatgatcttggctcactgcaacctccgcccccaccctgggttcaaacaattttcctgcctcagcctccctagtagctgggattacagacgcctgccacaatgcccggctagtttttgtacttttagtagaaacagggtttcaccatgttggccaggctggtctcaaacttctgacctcaggtggtcctcccgcttcggcctcccaaagtgctgggattacaggcatgagccaccgcacccagccccttctgtgaaagatttttttctcatgctttgcagggaagtttctaaatcttatttaacccagtgaggctcaaccaggagtaattttgttcttcaggggacatttggcaatgtcccctaaacatcctacaatgctaacaccatcctacattgtacatcctatgcaggaggatgcagctaaatatcctacaatggccaggacgccccaccatacagaacgttccagtccagaatgttcatagtgctgagactaagaattcctgtacccggccaggtatggtggctcgtgcttgtaatcccagcactttgggaggttgaggcaggcagatcacttgaccctaggagtttgagaccagcctgggcaaaaccctgtctctacaaaaaaatagaaacacttagccatgtgtgttgtcacgtgtctgtgccccccagcctcgggaggctgaaatgggaggattgctggagcctacgaggttgaggctacagtgagcagtgattgtaccactgcactccagcctgggctacagagcgagaccctgtctcgaaaaaataaaaataaaaaaagaatccctgtacccaattcctttcagcctcttggggacatgagtctttagaaggatcttctctgtggtacgaagtgaagcttcctttactatgaaatttatctgaataaagcatagattcgcaggctctgctcacagactaaaggattagaacttggaggtagctgggtgcagtggctcacacctgtaatcccagcaatttgggaggccgaggcgggaggatcacctgaggtcaggagttcgagaccagcctgaccaacatggcaaaaccctgtctctactaaaaatacaaaaaaattagctgggcgtggtgacgcatgcctgtaatcccagctacttaggaggccgagacaggagaatcgcttgaactggggaggcagaggttgcagtgagccgagatcgtgccattgcactccagcctgggcgcaaaactccatctaaaaaaaaaaaaaaaagaacttggaggtgatgcctgggaattaaattttattttgaaggcccccaaacagttatgtaactctggtgttgcttttgacctctgcaccttcaggagaacctcatccttccttctggaactttctaaatacacacacacacaatgtatacttttcttgtctttgtaaaaattttattattactattttctgagacagggtctcgttctgttgcctaggctggagtccaatggtgcaatcatggttcactgcagcctcaagctcccaggcttaagtgatcttcccacctcagcctcctaagtagccaggactacagacatgagccactatgcccagctaattttttattttttgtagagatgacggtcttgctatgttgcccatcctggtctcgagctcctgggctgcagcaatcctccccgctcagcttatcaaaatgctggaattacaggcatgagccactgcacctggcacctttattttatgaatgctatttttaattgtaaagtgattcttattcatggggacacccttcagttggtctattggctattagttccctattgctactctaacacatttccacaaacttagtcgcttaaaacaacatcaatgtattcttgtatggttttgaaggccagaattctgaaatcagtttcactgggctaatgtcaaatcaagctgaggctgggtgcggttgctcacgcctataatcccagcactttggaaggctgaggtgggtgggtcacttgaggtcagcagttcgagaccagcctggccaatatggggaaatcccatctctactaaaaatacaaaaattagctgggcatggtggcacacacctgtagtcccagctacttgggaggctgaggcaggagaattgaggagaacccgggaggcggaggtggcagtgagctgagataggggccattgcactccagcctgggcaacagagcaagactctgtctcaaaaaaaaaaaaaaaaaaaaatcaagctgggtgcagtggcacacacctgtaatcccagctaccctgtaatcccagctactcgggaggccgaggcaggagaatcgtttgagcccaggagttcaagatcagcctgggtaacatagtgagacccccatctctaaaaataaataaataagtaaaaataaattcaagtcagcagggttggtttcttctggaggatctaggggggaatccttctctttgtcttttctggcttctgaaacccactggcatcttttttgtttttttttaatttttttgagactaagtccagctctgtcaccctggctggagtgcagtggcacgatctcagctcacagcaacctctgcttcccaggttcaagtgattgtcatgcctcagcctcccgagtagctgggattacaggcgcccaccaccatgcccagctaatttttgtatttttgatagggagggggtttcaccattttggccaggccggtcttgaacgcctgacttcaggtgattttcctgccttggcctcccaaagtgctgggattacaggcatgaaccaccatgccccatccccactggcatctttttttttatgctttaaacaatttttttttttagaattcaaaagcaaactctggatcctgagcttaactgtaatggagtagattacattccatttatttttgtaaattattttattttttcattgatgacttagagggactatcttcaaaccagtacaaatatttcatagataatacctggccaatttctaaccaattgagtaatttgttgcataataagctacctcaagtctttcagcaagaaatacattaaatttgaatagtgaagacattacacaatgaattaggacataattaaaatttgctttaaatatttctttggtggagagaacaccacacttctgctcaatgaagagaaacattttcatactccagaggcattttattttattttattttatttttttgagacggagtctcgctgtgtcgcccaggctggagtgcagtgacgtgatctcggctcactacaacctccgcctcccgggttcaagcaatgcttctgcctcagcctcccgagtagctgagactacaggcacctgccaccatgcccggctcatttctgtacttttagtagagacggggtgtcaccatattggtcaggctggtctcaacctcctgaccttgtgatctgcctgcctcggcctcccaaagtgctgggcttacagatgtgagccaccctgcctggccttttatttttttgttaacacctattatgtcatgaattcatagggaagaggttccagcagctaaggctccttcccactggttttcacacagtgtgcttctctgggtggagcaggctggcgcttcagttgaacccaggcacctttctctttggcttctttctttttctgatcattttccttcatgcatttcaggaagctatctcagttcttagagtgcttaatatgctcaatacacacatcaattctcttggcaaggatcttgccctcgtttgtttacaacaatgccaacagcatgctggggaacactgtagattcttccagttttgccatgttaacacttgtggagcatttctttttgaacagtaccttctcttgatgtctacaatatcacctttcttatagattcacatatacgtggccaaaggaacaacttcatgttttctaaaaaagcctagagaacatatatcgggtgcctctcctcttttcctttgtgtttgtcatcttggcaaattactggaagatggcggttctggccgaaaagccccactggtatcctttgcttgtggtcccttcttgtgtcactccaagtcactccaatcctttcaatgctatgtattcacctaacctcttgtctccctcttctaaggacatttgtgattacatttagagcccattcagatgatccaggataatcttgccataatctcaaaatccttgacttaatcatatctgcagggctgggcatggtggcacgtgcctgtagtcccagctgtgaaagaggctgtggtgtgcagtaggattgcttgagcccaggagtttgaggctgcagtgagctatgattgcacctctgcactccagcctgggcagcagggcaagatcttgccaaaaaaaaaaaaaaagaaaagaaaagaaaagaaaaatcacatctgcatctacaaaattccttttgccatttaaagtaacatccatagggccaggtgcagtagctcatgcctgtaatcccagcactttgggaggctgaggtgggtggaacacctgaggtcaggagttcaagaccagcctggccaacatggtaaaacaccatctctactaaaaatataaaaattagctgggtatggtggcaggcgcctataatcccagctacttaggaggccgaggcaggagaatcgcttgcacccaggaagtggaggttgcagtaagctgagatcgcgccactgcactccagcctgggcaacaagagtgaaactccgtctcaaataaataaagtaacatccacaggttctgagcaatagatgtggatatctctcgggggacattatttagcctattgctacagtatcctttggagaggctgagattgtgtcttgctctatggatgtgtcagtcatatgatacatagttatgtatcatagtacagtgtatcagtcatggatcaaggtgggaaaacagaaatcacttgaggtcttttaacagaaaggggtttcatataggaaattgacaatgactccatgctgccattgcagcctgaaaaacaaccacaggcaatacataaatgaatgagcttggctgtgtgccaataaaactttatttgcaaaaaccagtgtggagtcagatttggcctgggggctgaagtttgccatctctgggtacaaaggatcaggactgagtctggtcctacagagatgaccttgaagaagtggctttccaaagcgccccgaggttgtcactgaacagaggaatgctaaaacctcaactgtttccacatctggctgctggcagagtgaaggggaaggaaaaccaagacgactcaagtcccttttgttttccagactcccagaggtgcatctggcaggtgaacttgggcagacaccctgagtctgcccagccacagggagatctgcctgtgtagctggggctttggaatggggtgggacaggggcggatgctgatgtcaacctgccatggatggcttattagcgtaggttacaatgatgatagggacgacggtgtaactgtaggatgcataatcatcgtcactattacatgtaattgcaggatttggagcagagtaattatcatgcaatataatcaattatataatgaaatgtaatctcagacagatcatcaacgacataattgtgttatgccctccaggaaatggaatatgcctctttttgaagttcccgggtggttctgccaggatggctggtggtgggagaagaaggcaagagccaaatggggttaggatgagagggacagtgattggggtgggggtgtttcaggtgacagtggaaggatagtgatgggcgtgagaatagtgtgagagtttagtctgaggttgagagaagtgaggagatgcaggcgaataagttgaagaacaatgaggtcaggttagggattagcaaactggatgagggccaaatctgacatctgacttttttttttttttgaaacggagtttcactcttgtcgcccaggctggagtgcaatggcgcgatcttggctcactgcaacctctgcctcccgcattcaagcgattctcctgcctagcctctggagtagctgggattacaggtgtgtgccaccatgcccggctaatttttgtatttttagtaaagatggggtttcaccatgttgtccaggctggtctcgaactcctgacctcaggtgatccacccgccccggcctcttaaagtgctgggattacgggcgtgagccaccactcctggcctcaaatctgacttgttttaaaaaaaatttggcagggctgggcaccgtggctcatgcctgtaatcccagcactttgggactcacctgaggtcaggagttcgagaccagcctgaccaacatggtgcaaccctgcctctaataaaaatacaaaaattagtcgggcgtggtggcacacacctgtaatcacaggtactcaggagggtgaggcaggagaatcacttgaacccaggaggcagaggttgtggtgagcggagatcgtgccactgtgctccagcctgggcgatagagcgagtctccctcttaaaacaagcaaacaaataaaacaaacaaacaaaaccccaaaaattatttggctgaacacggaatctggaaaaaaaaatttttaaattgaggtaagaatcagacaacataaaattaaccagattaaaatgtccaatttggtggaatttagcacatttgcaatgtcacacgaccatcacctttatcaatttccagaacattttcatccccctaaaaggagatctcgtttctatcagcagtcactctccactccctctcccccagcccctggcaccaccaatctgcttcctgtctctatgtgttcccggaaaggggtcctgatcaagaccccaagagagggttcttggatcttgtgcaagaaagaagtcagggaggccgggcgcggtggctcacgcctgtaatcccagcactttgggaggctgaggtgggcggatcacgaggtcaggagattgagaccatcctggctaacgcagtgaaaccccgtctctgctaaaaatacaaaaaaattagccgggtgtagtggcgggcacctgtagtcccagctactcgggaggctgaggcaggagaatggcatgaacccaggaggcagagcttgcagtgagccgagattgcgccactgagctccagcctgggcaacagagccagactctgtctcaaaaaaaaaaaaaaaaaaaaaagaaagaagtcagggtgagtccatagagtaagtgaaagcaagtttattaggaaagtaaaggaataaagaatggctactccaggccagacacagtggctcacgcctataatcctagcactttgggaagccaaggtgggtggatcacgaggtcaggagactgagaccatcctggctaacacggtgaaaccctgtctctactgaaaatacaaaaaattagctgggcatggtggtgagcgcctgtagtcccagctactcgggaggctgaggcaggagaatggcatgaacccagtgtcaggcctctgagcccaagctaagccatcatatcccctgtgacctgcatgtacacatccagatggccggttcctgccttaactgatgacattgtcttgtgaaattccttctcctggctcatcctggctcaaaagctcccctactgagcaccttgtgacccccactctgcccgccagagaacaacccccctttgactgtaattttcctttatctacccaaatcctataaaatggccccacccttatctcccttcaaggactctcttttcagactcagcccacctgcacccaggtgattaaaagctttattgctcacacaaagcctgtttggtggtctcttcacacagacacgcatgaaatttggtgccgtgactcagatcgggggaccttccttgggagatcaatcccctgtcctcctgttctttgttccataagaaagatccacctacgacctcgggtcctcagaccgaccagcccaagaaacatctcaccaatttcaaatccagtaagcggcctattttcactctcttctccaacctccctcactatccctcaacctctttctcctttcaatattggcgccacacttcaatctctcccttctcttaatttcaattcctttcattttctggtaaagacaaaggagacatgttttatctgtggacccaaaactctggcaccggtcacggactaggaaggcagccttcccttggtgtttaatcattgcaagaacgcctctctgattattcacccacatttcagaggtgtcagaccatgcagggatgcttgccttggtccttcacccttagcggcaagtcccgcttttctaaggggcaagaatccccaatcccttatttccatgccccaacctcttatctctgtgcctcgatcccttatttccatgccccgacctcttatctctgcgccccatcccttatttccgtgccctgacctcttatctctgtgccccaaccccttatttttgcaccctgacccctttctggcttttctggaaggtaagaacccccaaaccccttccctctgtgtctctactctctcttttctctgggcttgcctccttcactataggcaaccttccatgctccactcctccatctcccttagcctgtgctctcaagaacttaaaacctctttgactcacacctgacctaaaacctaaatgccttgttttcttctgcaatgctgcttgaccccaatacaaactcaacagtggttccaaatagccagaaaacggcactttcaatttttccatcctgcaagatctaaataattcttgtcgtaaaataggcaaacagtctgaggtgcctgacgtccaggcattcttttacacatcggtccctccctagtctctgtgcccagtgcaactcgtcccaagtcttccttctttccgtctctcctgtcccctcagtcccatccccaagcgtccctgagtctttctaatcttccttttctacagacccatctgacctctcccctcctccccaggctgctgctcaccaggccgagctaggtcccaattcttcctcagcctccgctcctccaccttgtaatctttttatcacctcccctcctcacacccggtccagtttatagtttcattccgtgactagccctcccccacctgcccagcaatttcctcttaaaaaggtggctgaagctaaaggcatagtcaaggttaatgctcctttttctttatccgacctctcccaaatcagttagcatttagactctttcatcaaacatgaaaaacccagcccagttcgtggctcgttcggcagcaaccctgagacgctttacagccccaaaccctaagaggtcaaaaggctgtcttattctcaatatacattttattacccaatccactcctgacattaaataaaaccccaaaaattaaactccggccctcaaaccccacaacaggacttaattaacctcaccttcaaggtgtacaataataaagtagaggcagccaagtagcaatgtatttctgagctgcagttccttgcctccactgtgagacaaaccccagccacatctccagcacaaaagaactccaaacgcctgaaccgcagtggccagggattcctccagaacctcctccaccaggagcttgctacaagtgccggaaatctggccactgggccaaggaatgcccgcagcccaggattcctcctaagccgtatcccatctgtgtgggaccccactgaaaatcggactgttcaactcacctggcagtcactcccagagcccctggaactctggcccaaggctctctgactccttcccagatcttctcggcttagtggctgaagactgacactgcccgatcacctcggaagccccctagaccatcacggacaccgagcttcaggtaactctcactgtggagggtaagcccatccccttcttaatcaatatggaggctactcactccacattaccttcttttcaagggcctgtttcccttgcctccataactgttgtgggtattgatggccaagcttctaaaccccttaaaactccccgactctggtgccaacttaagacaatactcttttatgcactcctttttagttatccccacctgctcagttcccttattaggccgagacactttaactaaattatctgcttccctgactattcctaggtgacagccacaccacattgccaccttttcccccagttcaaagcctccttcacatcctccccttgtatctccccaccttaacccacaagtataagacacctctactccctccttagcgaccgatcatgcaccccttaccatcccattaaaacctaatcacccttaccccgatcaatgccaatatcccatcccacagcacactttgaaaggattaaaacctgttatcattctcctgttacagcatggccttttaaagcctataaaccctccttaccattccctcattttacctgtcctaaaaccagacgatgcttacaggttagttcaggatctgcgccttatcaaccaaattgttttgcctatccaccccgtggtgccaaacccatatactctcctatcctcaatacctccctctacaacccattattctgttctggatctcaaacatgctttctttactattcctttgcacccttaatcccagcctctcttcgctctcacttggactgaccctgacacccattaggctcagcaaattacctaggctgtactgccgcaaggcttcacagacagcccccattacttcaatcaagcccaaatttcatcctcatctgttacctatctcggcataattctcataaaaacacacgtgctctccctgctgatcgtgtctgattaatctcccaaacctcaatcccttacaaaacaacaactttccttcctaggcatggttagtgcagtcagaattcttacacaagagccaggaccgcaccctgtagcgtttctgtccaaacaacttgaccttactgttttagcctagccctcatgtctgcgtgcagcggctgccactgctttaatacatttagaggccctaaaaatcacaaactatacttaactcactctctacatttctcataacttccaaaatctatttgcttcctcatacctgacgcatatgctttctgctccccggctccttcagctgtactcactctttgttaagtcccacaattaccattgttcctggcccggacttcaatctggcctcccacattattcctgataccacacctgacctccatgactgtatctctctgatccacctgacattcaccccatttcccgatatttccttctttccttttcctcaccctgatcacgcttgatttattgatggcagttccaccaggcctaatcgccacacaccagcaaaggcaggctatgctatagtacaagccactagtccgcctcttagaatctctcatttcctttccatcgtggaaatctgtcctcaaggaaatcacttctcagtgttccatctgctattctactactcctcagggattattcaggccccctcgcttccctacacatcaagctcgaggatttgccccactcaggactggcaaattagctttactcaacatgccccgagtcagataactaaaatacctcttagtctaggtagacactttcactggataggtagaggcctttcctacagggtctgagaaggccaccgctgtcatttcttcccctctgtcagacataattcctcagtttagccttcccacctctatacagtctgataacagaccagcctttattagtcaaatcagccaagcagtttttcaggctcttggtattcagtgaaatctttatatcccttacagtcctccatcttcaggaaaagtagaacggactaaaggtcttttaaaaacacacctcaccaagctcagccaccaacttaaaaaggacggacaatacttttaccactttcccttctcagaagtcagacctgtcctcagaatgctacagggtacagcccatttgagctcctgtatagatgctcctttttcttcacatggacgcccatgaaacccgggaggtggagcttgcagtgagccgaaaccgcgccactgcactccggcctgggtgacagagcaagactccatctcaaaaaaaaaaaaaaaaaaaaagaatggctactccatagacagagcagccccaaggctgctggttgcccattgttatggttatttcttgatgatatgctaaaggaagggtagattattcatgccttgcgtttttagaccaaatagggtaacttcctgatgttgccatggtatttgtaaactgtcatggtgatggggggagtgtagcagtgaggatgaccagaggtcactcttgtcgccatcttggttttggtgggtttgggccagcttctattattgctgttgttgttgagacggagtcttgctctgtcgcccaggctgcagtgcagtggcgcgatctcggctctctgcaagctctgcctcctgggttcacgccattctcctgcctcagcctcccgagtagctgggactacaggcgcccaccaccatgcccggctaattttttgtatttttagtagagacggggtttccttcctttttttttttttttttttgagatggagtttcactcttctcacccaggctggagtgcaatggcaggatctcggctcactgtaacctctgcctcccaggttcaaatgattctccagcctcagcctcccgagtagccgggattacaagcacttgccaccatgcccggctaattttgtatttttagtacagacagggtttcaccatgttggccaggctggtcttgaactcctgacctcaggtgatccactcgcctcagcctcccaaagtgctaggattacaggcgtgagccaccgcgcccggccacttccttcctttttatggctgaatcatattcattgtatgaatagacaacatgttgtgtttatccattcatttgttggtggacacttgagttgtttccaccttttggctattgtgaatagcgctattctgaacacgtccaagggtttgtttgaatatatccgcttgattttctaaataaagttttattggcatgcagtcacgcccatcatttgcatgttgtcaaggttacaatggccgagttggttgcaacagagacagcatagtacacacagcaaatctatttactagctcgccctttacagaaaattttgttgacccctgtattgatcatgaccaaaatgagtctgggaattgggttgggttgcagaaactttacattaggcctggatgaccattctcctctccttctacctgtccagaacaaaggggttacatttcccagcaagcagtcttgagcctcagtccccaagccccattggtaacacgatgggtcccacacactgaaggacaagacttgagacccttttgtagcgaggggcaaatagatccacatcagtcacagtgcgtagcctatgcacttgggtacagaaacagctaatgagcaggggcactcaaggacctgcaggctgcctctgcagacatcatgcagacagctgcggtttgtccccttttcccagctatatgctattctttgagaagataccacacccccacgtgcaagtttctcaaaggagaaaagtcccccaggagcgggattgctgcgtgctggataactcctggtgtaagccactttctggccccacttttagtcctgctgtctgttacttgcaaccaaaagcactcactgaacccactcctggtggtggatcccgcagctcccgtcctgtccgctcaaatgtagaaataaccccagacataaggaggggaatttcggaatttaccgaggaaactgggctgaatgagattccatttctgcttcctcgtgggatggagactcaaaacagaaattaaattcagctgttggaaaatggagtttcattcctcacacatctgagtttatgaaatgagattcccagctgctacttttttttctttttttttttttgagatggagtctcgctccgtcacccaggctggaatgcagtggcgtgatcttggctcactgcaagctccgcctccccagttcacaccattctcctgcctcagcctcccgagtagctggaactacaggtgcctgccaccgtgcccggctaatttttggtacttttagtagagacggggtttcaccgtgttagccaggatggtctcgatctcctgacctcgtgatccacccgcctcggcctcctaaagtgctgggattacaggcgtgagccactgcgcctggccccagctgctacatttaaaacagacatggccaggcacagtggctcacgcctgtaatcccaacactttggagggctgaggagagaggattgcccaaagtgaggagttcgagagcagtctgggcaacatggcgacatcctatcactacaaaaaatacacaaattagccaggtgtggtggtgcacactactcaggaggctgaggtgggaggatcacctgagcctgggaggttgaggatgcagtgagttgagattgtgacactgaactccatcctgggtgacagagcaagaccctgtctcaaaaacaaacaaacaagaagatcccaaaaaacccaacaaaaccaaacaagcatgggggtgtgggttgaattaagggcatgtattcctagtgtttgtatcttaacttccttaagggcaacagatggccgggtgcggtggctcacgcctgtaatcccagcactttgggaggccgagggagtggatcacctgaggtcaggggttcgcgaccagcctggccaacatggtgaaatcctatctctactaaaaatacaaaaattagccaggcaaggtggcgggcgcctgtaatcccagctactcaggaggctaaggcaggagaatcgcttgaatctgggaggtggagattgcagtgagctgagattgcaccactgcattccagcctgggcaacagagacttcatctcaaaaaaaaaaaaaaaaagcaatggttgcaaatgttctgagttcaagtcccagctccatctcttcctggctatgtgatctgagcaagatcttgtctctctgtacttcagtttccttctctgtaaaatggggatgactccagttgcggatgagccgcgttcatgggcaagcagtgtgttctactgagtctgcgcctacctagtaggtgctaatcgtacgtgaggtttttgtttttgtttttttgctgataaaggaatgcaaggaggaggcaaccacgtgtccaaggctgtgtgtggtttttctttttttaatgtctgctgttaataaaatatttttacagagaccaaaaagtcagaatagtgcaaaacatctcaacaccatgcattcatgaccacttctcgtttgtgttaaacatttgttccaagtcacatatttacagagaaatgaaggcgtctgtgcagacactggaccgacggggtagaatcaaaacaaaacaaaaaacaaacaacgttttgatttcacatctgcaatcacatgctaagagttgtgtggaggggaagcctccccggactgcttggccggtttgtgggggtctgagggagcacgagacaggggtggacaggggtcaagtccccctggctgtgtggttggggatgatcaggggaccctccgcctgtgacctgtgtctccagagagccactatggctggacgggggtaaggggtggggtgttacttgacacagtcaacttgatttttctctgaaacaataaaaggcaaagagaaaagcaacacgtgtcagcaaagacaactttggtcctcaacgattcttaggaaaggattctggggagcagacggggttgtgatccgggactaaggccctcccccaacttccccagggtggcagagttccgggaggccccaggttgtccccatctgcaaaatcgacagcacatggggtaggggtaggggacagaaaggctctgagatcccagccgagagaggtcccaaggatttctagttgggtgtttagttttttgcatctctgatgggggcatggtgaggtctcaggctctggggcctgagagaggaattgggggtgtggacaggcacctcctcattttatgcaaatcattcgaggacagactggtaagagtgaacagatccttctttcttcaggacaccctctttacttcccccgacactccctgccttggtctctgcatttatctttctctgtatatttccacctctatgtctctctccatctctgtctctctccgtcctcatcggggcgtgatctcaccctctgtctctgtgttttctactctattcctcttggtcaggggactttgactctgaggcatccctcaatgtcacccctttaacccttgccctgccacaggccaaccttcttgtgctgtttccccgattcatggaaatgtggggccagctccttgcataaagcgaggtccagggttcagaaccctggaggtgtcatccaaggccgggctctgtgtccacttgctgggtggcgttgaggaaagccctgctcctctctgggctttgttctgccaatacaggaacttcctgatttcaaaaggctttcagccccctggactccttgtcttttctctgtccgtgtctcagccatgtccactctctgtcccatgtgtcaggctcagacacctcctatgtgcccaggtccgtgtggaaggggaaggttggtacggacagacatggacagacatgcatgcggatgtgtattctcacactgaccctgccccaatacataattccactaggcgtagactccctgtcacccacttgtgcccagcctgtgctaggtaaagttgggggtcctgagagtcctcagaccccagtctgggagaaacagagctggacagagaaacccccagtcccatggcatcaggctggactggaggagagacggtggctgggaaagtcctgaggggaaggaaggagggttttctccaagaggggtttccgtgatgggttttgaaggacgaataggagttctctgggggaaagaaaagagggtggaaattgcaaaaacagttctagcctgggagtcaggaaaactcattcaacaaatattccctgaagaagcttgtttccttcacatgcctgggccattgctggggaaccctaaacacacacacacacacacggaggtcttgaacagaaagactcctaaggaatcttttgggaaataacttggctctctcaggcagctcgacttccccatttctttccagccatccaaaaatcttccagatcaccctcaccccaggtcacagatcacttcccctttgggctctatgggttacaaccctgaatcatccatccacccgacccctaccctcagccatgtcatggttcgaaattcacatctgctcctcagtccatataacagtcacataagcttatccctggctacaacttcccaaccctgtatgagaatttgcattttaacctttggttcagaacctccagttacctgcacctgtctgaatttaagggacatgcaacatctccaagcaaattagaaagtggcgccacttcttccagacacttgggccattcacatgtcgggaaaccaacgtcacaaacatacaacactcaatatctaggatttgcacgtggccttcttagcaatgccaaacccttgggcactgtgcaactgggacaactgtactcagcagccctagagctcatctaagggcaggatttttttttttttttggtggggtagaggggagggaatggagtattgttctgttgcccaggctggagtgcagttgtgtgatcacgactcactacaacctctgcctccagggttcaaacaattctcccgcctcagtctcctgagtagctgggactacaggcatgcaccactgcacccagctaatttttgtatttttagcagagatggggtttcgccatgttggccaggctggtctcaaactcctgaccttaagtgatctgccagcctcggtctccccaaatgctgggattatagtcatgtccccacagctataggtgtcttttcaacacagccttcagaatctttccaagaatccatttcagtgtccccaaagcacctccacctctcctcactggttttagtcttcacaaaacagcttttgcaggctggaatccagtctctccccaacttaaaacagctcctggagctccccaactgtcttagaataaaagtaaaactcctcaggactgcgtacgaggccctgcctggtctgatgcttctgcagatctccccaaccccaaggctcctcacgatcccccttgctggctcagctccagccgtgccacccttctcgttgtttcaacagttcttctctcctggccttcgcacgtgctgttccccaggcctggagctcttttctctctagtaagtggttccctctcattcttcacctcggaaagcctccccatctgatgttctatcctccagaaacccagctactcagctcaccccgttttcatttctccctagcacagcaaaatcttgtccttcccaatccagcagaaaaaggcgtgccatacacacatgtggaaaagcagatcccagagcaagtgtagtccacgctgaactttcccctaaggtcctatgtgcaccaggtaactccagccaggtcactgtaactttgctcattggagaaagagcttccagctggcaagagggccatctgaggtatcctgtggcttgggtgtttgaatcaatgaataggctcttggagactaagctctcactgtgtcactgtgtttgtgtttctctctctctcattctctttctctcattctctttctcccccctagagtttctggtctccttctgttctttcctatttggaaaattctggaaaaggaagaagggatggagaaacctgggaccaggggatcccaaattctcttttgtggtgggaggccctcatggcatcccccatggagatcccaggagaaagggctgagggcaaaggtcctgcttggcagccggagaaggaaaggcgaagtaggggtcttggcctggaattcccaccccttggaggaggccgagggggaattagcagcaatagggagctgtgtcaggtcatcccgatctcagcccacccttccatggggcacacaggcctaagggaggggcacagagggtatggcacctggaaccttggccaagtctcaagcagctctttaagcctcagttttgccatctgtcaaatgggtgtgttgaactctatgatatgaggactgggtttgttgggggagagggagaggcaaactcccaaagggaagtaggggcagcgtggggaaccagagccgtcccctcggcccccagggtttgggcgcccaagggcgcatgtgcttttgaaatcccatcctcccccctccccccatttattttttgcacaaatatctaaagggactccggtattccggggccctccaaccagcatcctggtccctccagtccccaggccacctagaggggcgctccagagagccctaccccttgcccagggccccccctcgagggagctgagatttccatacttggcaattggtctggggtcccaggggtctgggtcccatcttatggcttttccaggggacatgaggtggtgcctcccggtaccagagccccgggatgtggcctcctccatagggacgaggtttcccccatcccagctcaaaatgccccctaggtgctgggggcgtggcctcaagttggggatgtggctccttccttcgtcgcgcccttgggcgtggcctcccgagagggcggggcatcctccattcctaattccccaaaagggaaagctgagtcaagggcgtaggcgcagcccacccttggcgtggagccccccgagccccgcccctggggaggtcccaccaaggcgcaagccccgtccctccccgcccagcgccctccgcgcaggcgcagtgccgctcggccgaccgcccgcgctaaggcgcaggcgcggcaccgccctcctcggcggagcgcgtgtccgacttgagcttcacgaactccttggccacctcgtcgttgctgcgctgcgagaggattcgcagcaccgtgaggcccgtgtcgtccatgtggatgcggcggccgagcggcagccagcaggcggcgctcccgcgctgggccagctcacgcagctgcagcacggccagccccaccgtgcggtcctcgcgcgcgaagcagtagtccttgacgcacacctgcagctcatagcactcgggacccgcgtcggcgctcagcgtgctgcgtggggaggggcggaacgtgagacaggccacacctactgtgatgccccgcccacggccccgtccccaccgcatttgcgggccacgcccacaccggggtgcccacacctgtcacctcccacgctacgctagccccgcccctgccccgttacttgacctacaaccctgtgcttggccgcgcccacagcagctgaccccgagctgggccacgcccacgcctgttcttcccatttttccacccaccgaaaaatgaccgcatagttttacatccagctcccgcccctcagacaccgccctgcaaggccatgctcccaccctgagatacccgcgcctgtgccctctgccggctgaactgctgcccgcacggccctgcccctaatgtcccacccagaagctctttaaccaggctctcctctagacccacgacgtggccctttccccagccccccacacccccagcccacccctcttacttccaagatgccctccagacatgagcctgccctggtgcctcaccatgggtgacaccgcctcccgcatgcccctcacctgtgctcctgcccctaagcagtcccagtgacctgccctgacgccagctggataagagcccctcctacagggtcacgcccagcttctccctcttgtccacctcccaggttgtacctctatccctgaagtactccggcccaccctggctgacatctgacctcccactagaccatgcttctcctcctgagtatcccctaaaggggccaatcgccccaaaaccttctgaccaagagccctgtgctgacacgacatggaactggcttcaatcttgtcccataagagctcccaggccccctagataataccagctaaccagctctgatttacccttacccctgtgcatttttatttatttttatttatttttattttttgagtgggcatctccctctgtcacccaggctggagtgcagtggcacaatcgcggctcactgcaacctctgtctcccgggttcaaacgattcttctgcctcagcctccctagtagctgggattacaggcatgcaccaccacaccgggctgattttttgtgtttttagtacagatgggggtggcgggggggggggtctcaccatgttggccacgctggtctcgaactcctaacctcaggtgatccactgccttggcctcccaaagtgttggaattacaagcgtcagccaccgcgcctggcccatagttttttgtttttttaaagacagggtctcgctatgtcggtcacccaggctggagtgcagtggcacaatcatagctcattgcagccttaaactcctgagctcaagcgatcttcctgccccagcctcccaggtagctgggactactttcttctgcacttctgtctcctaagaacatccaacaacattgccctgccccagtgctctgtgaggctgacactcgacccaaggatctaccccggatgaccccaactctacccttgctaaccaccaccatccatctacccccgtgaacagactttttttttttttttttttttgaggcagagtcttgctctgtcgcccaggctggagtgccgtggtacaatcatggctcactgcaacctgtgcctcctgggttcaagcgattctcgtacccctcaccctctggagtagctgggattacaagcgcctgccaccacacccggctaatttctgtattttttatttttttgagtctcactctgtagcccaggctggactgcagtagcgccatcttgggtcattgcagcctccacctcctgggttcaagcgattctcctgtctcagcctcccgcgtagctgggattacaggcgcccaccacaacacacagctaatattttttgtatatactatattatatacaatatataatatatgaaatatataatatatatacttttatatataatataatatatactatatataattttatttatactatataatatatactatatataattttatatataatataaatatatattatatatgtatataaatatatatatatttatatataatatataaaaatatatttatatgatatatatttattatatattatataatataatataaatacatattttatatataattatataatataaatacatattttatatataattatataatatatatttcttttagacggagtcttgctctgttgcccaggctggagtgcagtggtgcgatctcggctcactgcaagctctgcctcccgggttcacgccattctcctgcctcagcctcccgagtagctgggactacaggcgcccgccaccacgcctggctaggttttgtatttttagtagagacggggtttcaccgtgttagccaggatggtctcgatctcctgacctcgtgatctgcccgccttggcctcccaaagtgctgggattacaggtgtgagccaccacacccagccatattttatatttttaatagagatggagtttcaccatgttggccaggctggtctcgaactcctggcctcaagttatctgcccaccttggcctcccaaagtgttgagcttacaggcgtgagccaccatgctcggccagagcagactttttttttttttttgaggtggagtttcgcttttgttgcccaggctggagtgcaatggctcgatcttggctcactgcaccctccgcctcccggactcaagcgattcttctgcctcagcatcccgagtagctgggatcacaggcgtgcgccaccacacccggctaatttttttttttttttttgtatttttagtagagacggggtttcaccatgttggccaggctggtcttgaactcctgacctcaggtgatctgtctgcctcggcgtcccagagtgctgggatgacaggtgtgagccaccacactcggccagagcagacttttttatgctgtccacatcatcagcatcctctagaccctatcctgatacccgcagcctaggcccactcccaactccaagaacctccatccaatgtgaccccacctccaccccacgtgacacccacccccaagcctgggatccatctacactccactcctgtccccagagccgactcctccagatgggctgccccaacggtcctgacaaggctcaatgtagactccagtagtccccacccccatgcaacctcagtcctgtccccaggtccctcagccccccgctcataagcgtcatcactgccaccctcattccttcaccagacagagtctccagccccagcaatggccctgcccaccatgcacttcctgcccagactttccctcccctctgcaagtcttcatcatgaagttaccccactctactcattgcctccccttggatctgccagcccccaaaggtgacctccatcctcgtgtcccctccctgatgtcattcctgcactactaaggggtctccctttccagcacccccacctagaatgtggcccctcccattcccgggcccagattccagatacctcctgcctagctggctttggggttcacctggcggatgccccctcccttgcccccatgctcttcaaagcatcccaaactcacaactggaagctctcattgtacttgggagcccagctattgttcttggatttggtcgcaaacttgcgtttcttgtcgctgagctggggcccaatgatgttgacctcgatgaacggccggaagatgccagaagtctgccacttgaggtcattggcagccaccactgttggaggaagtagagggtaagacaggtcaggttctcccagttggaaaaagtagatgtttgtggctctcaaaacctgcccaaggctgggcgcagtggctcacgcttgtaatcccaccacttcgggaggccaaggcgggtggatcacttgagtccaggagtttgagaccagcctgggcaacatggtgaaaccctgtctctacgaaaaatacaaaaatcagctgggcgtggtggcacgcgcctgtagtcccacatacttgtggggctaaagcaggaggattgcttgagcctgggtggcggcagttgcagtgagctgagattgtgccactgcactccagcctgtgtgacaaagcaagatcctgtctaaaaaaaataaaaaataaaaacaccccacccctcgcccgccgccaaaaaccctgtctgaaataaagactacatttcccagcattgccatgaagctaagtgtggtcatatgactatgttttggccaatgaggtgagagaaaaaaatcacgtgtactacttctccactgtggcttaaaaggcagggagtgaaccccaaactttctccttcctctagccgcagtctgcaatgcttgtgggggctgagctctttgtgaccctatagtggaggaaaaacacatttgggtccaggtatggtggctcacgtctggaatcccagcactttgggaggcccaggtgggaggactgcttgaggccaggagtttgagaccagcctggataccatagtgagacaccatctctacaaaaatataatttaaaaagtagccaggtgtgatgctgcatgcctgcaatcccagcgactccggaagctgaggcaggaggatcgctagagcccaggagtttgaggctgcagtgtgctgtgattgcaccacagcgctccaacctgggcaacagagtgagactctggcctctaaaacaaacaaacaacaacaacaacacattagggatgaaaatgcaacaaaagatggcagcagcacagatcaccaacactgcgaagcctccatatcagctcgaggctggttgctacttaaactgttatcccagagaaaaaccaattctatcatttttgtttgtttgtttacatggagtctcactctgtcacccaggctggagtgcagtggcgcaatctcagctcactgcaaactccacctcccgggttcaagcgatcctcccacctcagcctcctgagtagctgggattacaagcacacgccaccacacccagctactttttgaatttttagtagaaacagggtttcaccatgttggccaggctggtctgaactcctggcctgatccgccagctttggcctcccaaagtgctgggattacaggcatgagccaccgtgcctggcctaattctgtcttatttaagccatgtcaaaaacagcccaatctgtgttctagtcaacaaaagccaagaaaaggaaagcagggctgagagatggagaaagtgggattcagtcttacaaaactgtttacactgctggatccagccatgcctgaaggtggccacctttggacgtttccgtttcatggaccattaaacaacaacaacaaaaaaagggtgttgcttaagccagtttgagtttggtttctgttttagaacctagcaagtccctcccacctcagaccactcacctttcactgtgaccttgtgttccccagttcctggatgagtgaacagctcaacatggacagagacttcacccacagggtcttctacacccaagcctgggcagggcaggggaggatggtcagcgtgagctctgttctttcccacccaccaggagggaccttgacggcctcccacccacctgtgctggcggcaccaggtcatcagccctgatagggaggcactgatggggggccaggatgggaggtgctcttgggaagccaagaatcctgggttctggccttttactgccttgctgtgtgatcttgggtagattgcttaacctctctgagcctaatgcaattcttttcttttttcttattccattgattgccatgttgtcaaaattcagtcttcatgttacattacatcttggcagcatctggcaccctggcctcctgtggctgtttgtcctcttggctgcaacaatgtcaccaactcgattctcatcctacatagttgtcactccctccaacccccttttgtcattttctcctccgtgggtcctcaaactgaccctgcacctcaatatttgacactcttctttgtcttcacttcctccctaggtgcccataaactggaaaatcctgccagctctaccttcaaaatacatccagaagcagagccatgtcttttccctgtatcctacacctgcccccagcatcccatgcctggactattgcagtagcctccttgctggtcttccttccactctttcatctactctcagtataccagccagaaaaatcctattaagtcagatcatgtcggcagggcgcggtggctcacagctgtaatcccagcattttgggagggtgaggcaaactcacttgagctcaggagtttgagactagcctgggcaacatggcaaaaccccatctctacaataaatacaaaaattagtggccatggtggggcgtgcttgtagccccagctactctggtggctgaggtgggaggaacacttgagctcagaagggtccaggctgcagtgagacgagatcgcaccactgcacttcaacctgggtgacagagcaagaccctgtctcagaaaattaaaaaataaataaataacatttaaaagtcagatcatgtccctcctctgctcaaaactcttccatgggtcgggcagtggtggctcatgcctgtaaccccagtactttgggaggctcatgcttgtaatcctagcattttgggaggctgaggtgggcagataacttgaggtcaagagttcaagcccatcctggccaacatggcgaaaccctgtctctactaaaaatacaaaaattagccgggtgtggtagtgcacgcctgtaatcccagctacttgggaagctgagacaggagaatcacttgaacctgggaggcagaggttgcagtgagctgagattgcaccactgcactccagcctgggtgacagagagagaccctgtctcaaaaaaaaaagagagagaaaagaaaattagccaggtgtggtgatgcatgcacctgtagtcccagctatctaggaggctgaggcaggaggatcgcttaatcccagctggttgaggctgcagtgagctatgatcccgccactgcacttcagtctgggtgacagagcaagactgtctcaaaaaacaaaacaaagcaaaaccaaactcttccatggctcccacctcactctgagataatcaaagtggtttttgtgacctgcaacaccccttccaatagtggccctttccaataggttactattacctctccccactcaccccattcttgcccttgttaactctgacccagccccacaggtcacctcattgcatcacctggcccagaatcctcatccctcctgatgtgacagctcatagcggcatcttttattttccttacccctatttcccttctagtgcagaatcttaagtttcttttttttttttttttttttttcttttttttgagatggagtcttgctttgtcgcccaggctggagtgcaatggcgaaatctcggctcactgcaacctcggcctcccaggttcaagcgattctcctgcctcagcctcctgagtagctgggactacaggtgcacaccaccacacccagctaatttttgtagttttgagacggggtttcaccatgttggccaggatggtctcgatctcttgacctggtgatctgcccgcctcggcctcccaaagtgctgggattacaggcatgagccaccgcacctggccttcttttttgtttttgagatagagtcttgctgtgtcaccaggctggagtgtaatggcaccatctcggctcactgcaacctccgcctcccaggttaaagcgattctcctgcctcagcctcctgagtagctgggattacaggcatccaccaacacgcctggctaatttttgttatttttagtagagatggggtttcaccatgttggccaggctggtctcaaactcctgacttcaagtgatccgcccaacttggcctcccaaagtgctgggattacaggcatgcaccaccgcgccaggcctcaacccctaatttttccattatggagtcaaaaagttcccttgtctgcttgaatcatggtgtggtgggcttctgtttggggccaccagccgtgtcctccatggtgccaatggggatcactgatggggcagcttaaaagaatctctcccggtcccgccttctgtgactcaaaagggcatcctgtggggcctgtggacctgtgaccgccagcacctccaccaacccctccccaccccccaccaggcaactccccactcctggaccaccccatgcacggggagaagaaggggaaagtcagaggtgagggtgggaggttgggtcagtcaaacgctgattgggttacctcacgctggacaggaagtgactgagggttggggagcacaggggcctggagacccccatcaccccagtactggggtatgtggccccggtctttgctgcacgccccaggccgtcttccttgttgcctcaggctcccattccacccccaccccccgccaccagtcacatgctcagccgccccgccctcccccaggccgatgcttcatagcaagctcaatccgggccagactggggtgccgggggtgccagggggaattggacagtggtgggtcaggtgaggggtcagaccaaggccaaagctagtaagaaggggggagggaggcagtgctgggtgcccccatcccgtgctttgctggcttcgcggggaagggtctttcctgggcctctcagtgcttcttccaaccccactccccactccccaagtcccgggacccctgcaggggaaggttcctcggacaagtggttgaatctcctttggctctcagtatctcatctgtggaatgatgtacccctcgtggggcagttaaagaaatctgtttcagtttccccaagaaggctaggcatggaggctcatgcctgtaatcccagcactttgggaggccaaggtgggaggatcatttgaggccaggagttcgagaccagcctgggcaacatagcccaggaggtggcggctgcagtgacctgagatttcgccattgcactccagcctgggtgacagcgtctgcctcaaattaaaaacaaaatggccaggcgctgggattacacctgtcatcctagcactttggaaggccgaggccaagatgggtggaccacttgaggccaagagttcaagaccagcctggccaacatggcaaaaccccgtctctactaaaaatacaaaaattagccaggcgtggtggtgcgggcctgtaatcccagctactcaggaggctgaggcacaagaatcgcttgaaaccaggaggcggacggaggttgcagtgagctgagatttccccactgcattccagcctgggtgacagagtgagactctgtctcaaacaacaacaacaaaaccaaacacagattcttcaagaaatgcctggcacaaggtcctgctcagccttagagcctgataagtattcactgagatcagcctgggcaacaaagtgaggccacctctctacaaaaaaaattaaaaattagctagccatgtgacgtgtgcctgtagtcccagctcctcgggaggctggggcaggaggatcacttgagcacaggagggaggctgcagtgagcagtgattgcaccactgcattccagcctaggtgacagaaggagaccttgtctctaaataataatatcaataacaataatcctatgaagtagggtccttgactgtccccattttacagatgagaaaactgaggctcagggagacagattcttgcccaaggtgcctacccgtggagtggctgggctggaatcagagcccagctcttaacctgacaggtgcctgtcccggggtcccaggatctggcttaaaaaatatgtcatatcaggagaaatggattctgggattcccactggaatcgcttcttccccatgtagaaccagcaaatcgtccttccccctcacccgcctgggccctccaagccgctcaggcctgggcggcggccctgcaggcccttgaggcagaaggacgatccttttactagccggggccaggaggggcgcaggcaccgggcaccaggcgcgggcggcgggcgggaggcggaggcacgtacccttctcaggataaatgtcttcactaagggtaaacctagtaccttttccaccatggactaattgggggtgggggtggaagggggagagaggtgggaagcatggggagcggggagagacgagccagtgagaggtgaggatggaggagtgtgtgtggagggggcaggggaggcgcggagaggggacggcgagtgagagggaggaaaaacaagagagagagaaacgtcagctgcagacagacggagagacagacagcctcctgctccagggacaccagggacactaaaagcagccaggactggaagggaagctgagctcagagacccagcgcccacggagggcccttgggctggctggatcgggggagaagggggccgttggaggccacagggctttgctcccctcgccccaggctgggtgtcgatggcgattctccctccccctcctgagttcaagccgccaaacttcttccccttgtcgggaccaattttgaaaagggggggtccccagggaatcctgccctccatccagccccagctgccgtgtgtgtgcgctcagagagggacaggagaccgaagcaaaatacagagagaaagagagagtttgagaaatgggaactccctctccgtccaccctcccccaccaagtcgaggtccctcccgccctcggagctgtcaatcattccttagccccatgacatcacagaggtccctcctcaggggagttcaaccactctctgggaccatgacgtcaaagttcccacccatggacctgccaatcattccttgaccccttgacatcagaggtcctgcccatcctgagctgtcaatcactcctgaagtctcccagagctgtcaacgattccctggacccatgactgtccaggtccctcaggagctgacaatcattcattggccctgggacaccattgattttcccaggagatgacaatcaccttgtggccctacgacgtcacaggttccacacctaagagtcatcaatcctaccctggtccttgatgtcaaagacattccatcccagagctgttaatcattgtctggccccaggacatcacagattttcccaggggttgacgatcacctccaggcctgtgacgtcagaggccccgcccccatgaacctttgatcgctcattggtccctggacttggtgcagagatgtcaattccgccccatccatgacgtcacaggggagtgagccaatggcagccgttcaggcttggggcggggctgtctccgcggagcgggaaagggtgatgcggtctgggtacccttaccctgggccgattgcgtctgtacaaaggtcttgattagcaggtcggtggcctgcgtgtagagcgacagggcatagcgcaaggattgcaggtccgggctcttctccaggaaggtcttcttgaggcccacgccacccgcgtggaaatattgctggggaggacagggtggggagaggtgaggatggtgggaacctctacccactcatagggctgggtagccctgctgtccccactcccaattcttcccgctactactttctcacctcttcctttgctttgcctagtgaactcctatgcattcctcagaacccacctctcacatgccgtcttccaggaaggcctggcttctcccaccttgggctcgcccagcccccatccttccctctacccttctacacctcaagaaatgcctggcacgaggtcctttacatccttccctctacaccttctcactctttgggctcccccagcccacatccttccctctaccccaagcctaatcctacaaggctgagaatgtctgtatccagcagtcttccccgacctggggctccttaaggctccagcattagccagcccagctctggcacagacaggggaacgagggagtgtccataaattgaacaaattaatgtgggtccgaggcgagcctaagtccatgaccacagcagccacaccctctacatcccccacctgggatggggaggggtagggcctctcaccttgatggtgtccagggccaactcaacaaccgcgcactgctttggggtcaagctcttggcttcttctcgtaccatgtgatcctggatggatggggagaggggccatgtgggtggagtgggctccacctttggaatctgtgtctatgggtctcatccctgttcaacttggaggagctgggctgagggtctatgttttcatcatcccagcacccaatatgtgactggtacacagcaggtgctcaaaaaatattggttgaataaatgacttgccctcttgatcaagctgtacctgaagctgaaccattcacatctttctgacacactggggagcaaatatcttgtgcttcagtgagtagagtttctgtcctttgagcctgtaatgcatgtcatcatcctgggacccctcccccaggatggtggcaacctggaagccacatgagtttggggggcagtccctcacgccataatctatccccactcctcaccttgagtttggacagctgacccagctccttggctgcattgaagatcatctgggttccctgcaggtaacaacatacagctgggtgagggcaggggtgctacagctgacactccagccccagagaccatcttggttcttgcccaaaggctctgggcagggcaataattgtgtcccagggacagaggtctggaattccccaggaagaactgaggaggatgtggtgaccttgtccctgaaaatcccggtcctgtgaggatagtcccccaccctctcagccccacccaggcttgtgtaacaggagaaacagacagggaccagactgtgaggggcagtgggttgggggagcctcagacggtggtgtttgtgggtgtgggcagggtttccagggaaagggagctttgggaacacaataggctaggctgaggttgcagaaaatggctctggtcaaacacttcctcctcctcaaggagcatcccctctgcagggaaatttcccctgtaatctgggaggaatttcagtctgatttttcttttctttttttttttttttgagacagagtctccctctgttgcccaggctggagtgcagtggcatgatcatagctcattgcagcctcaaactcctgggctcaagcaatcctcccgcctccccagtagctgggactacacgtgtgagccaccatatccagctagtttttgaaatttttttcatagagatggggtcttgttgtgttgtccaggctggtcttgaattcctgggctcaatcgatcctcctacctcagcctcccaaagtgctgggattacaggcgtgagccacattgccagccagtctgaccttttaaaggaaaaatcctccctctatacaaacacctccatatccgtcctccaccccacccccaaacagacactagcaagatggtgatgtggtgatggctctgacaagccagatgggcctgggttcaaattgcagtcctgctgtgtggccctgggcaaggcacttaacctctctgagcctcagttttcccatctagatgaggaaaattatatccactttgtggcttagtctggactgaacaagtctttgctcagtgttcgctaattatcacttggtctcaaagtcacgggcaatgctaagggagacggggtcccagcctggaaggcatgtgtctagcctcctctgtcactgctggatggccccaggcttgtccctgaatgctctgagcctcaattcccactgtggctaacagggatacccatggtaacttgggggacagggtggggctgagtattgaggtaacaagtcttgtcttactgggtcctggggtggtctgggggtcctgggtgaggctaggtggggagggggcccatttactgtggaaatatttggaattatgttcatagtctaccagctggccatctggtcattcctagaggtattactattatcatcttggctgttactattcttatttcttgtctgtgatcctgaggttcttacaaggcacagttactcaggggtccagcggactgggcctcagtttcccctgctgcacccacctgtagtctggcagggctcaggggccttcctgggtaccctctgccctacccaccaaccccccacccaccaccccccacgagcaagccagacagacaaaggaagaagagaccaacagacaggttcacagtacgccctcggacggcacgaaccacagaggtggaagggggcacaggggtggggtgggggggagtgggatgggagccagacagacagtgagaggccggtcttacgtctgagtggcttggcaatttcaccctgccctgtggagagaatcaggtggaggtcagagttctggtgactgttgggaggatactcagtgggacttccctgccccctcaaagcacagtctcacttcccagcccaggagctcctccccaggtcctgggtctaatggtgggccccctccccagctagcacctcctctggtcccctagcaggggtttagaggtcagactccttgactgccagcacactctcggggtacccaggaggctggaagcagcctcatcccacagtcagcctgccccaggatggggcacctggggaggtggggagatgagacagggctaggaatctgtctcctcctccattccctaaggggctgcccctatatcccagcacccaagtctacaaaaaacatattaacatatactgtaagttcactcagtgctgaagaacccatacactaaactacatacgtgcactcctaaacacttgcaggcacgtacacaattatatcacacacaaaaacccacacacccttcttgaccccacacggattcacatccacatatagggtgcctgggacactgaatgtgccccgcaaagggctggcagagagagtacggaacccctgtgacccacattcacaaagctaagactccatttgtagacacaaatgtacaacgatatcttctgcacaagtgtacagcaagacagctgcttgcgtgttgctgtagctcccatctccttaacaacaaacacccattagcacagcaacaaaaagaaatctacgtaaaaaacaacacgtctcagtccagggtggtgatctagcgtgtaggctcctcaagaaggcacagaatttcagctgagcccagggctcagatgagccctgtgggtattgctgtgggaggatgggagctgtttgtgcacacacattagttcacatgtggacacacacactgcacgttctgtccctggagaatcacttcatctctgacttctggttttgcaggacttggttaggagagctatctcctacccacgacccccagctgcccttcctgcccaggtgcacagacgcacacacatgcacacacatgcccagacactggagctcagggcctcagtgagacgaggccctcattaccttttctaatcccttgccatgttttctcaagaggttcccctgcagagataatgtcacagggtgatcaacctggcaagtcgtgcagggtgggaagctgggatgctcacaggaatattcatggggatgggggaatccacactgcacagggtactggtgactgggttgcatggggatagtgtgtttgtgtgtgtgtctgtgtgtgtgcacacacgtgcatgcgctttagtgactcactcttaaatggtgtgagaggcagagacaggaaagagagagaaagatacagatacagagctaaagaaagtcagaaagaagggaaaaaagccactgccaaaatataatccatttacatttactgtacacatgagactcttggttcttgggttaacaggaaagcaaatgggctgcatattcagacagatctgaatttgaatcctgattctggcatatatttactatatgaccttgaacaagtgactcctctctgagcctcagctttcctcatctgcaaaatggggataataatatccacctcactcaaagggttatcatgaaggtgagctgaaacaggagctatgagaaggcctggcatatggggagtcattaaatgcgaattcctttattccccctgcctacaaatgcattgcctgtggttgggtatgctgccaccaagtggttatagccaaagacccaggctgcagctaccaggaagtaagagcccttgtaaacttttaacaaagtgaaatcttgtaacagccttgtcttgcccacaaagggaaaatctgaagttgttttgtctctgctcttacacatgtctgcatatcaccaccaccaccaccaccaccaccaccaccattagctctgcctctgggccggtcactgagagtgcagtggcgcgatctcggctcactgcaacctctgcttcctgggttcaggcaatactgagatgagtattttaatgcatcatgccatttggttcttagaactaccctcagggaggtgatgcaatgagccccattttccagacaaggaaacagaggctgggaggtcaagtgacttcccaaggtcacagagagagacagtggctgggctaggatttgaccccaagtctacctgacatcaaagccatgacaaaagtctcccacttgggcacctgggtgtatgtctgggattggtgtgtgtcggtgtggatggcgggagttgggtagacagggtggtggggtaccaaggaatggtctggagcatggaatttcagaggaatcagaagtagagaccctcatggtgaggacctgcattctgggaagctgctgacagttcagagcccaaagaggaggtcagaggaatcctggggttgatcctctttctagcttcagggcgtctggtgacatctgggcacgggagcaaggttggattctacccttagacggcaggtccgctgcgaaggaggagctgggcttggggtttgggagtgggtagtggggctcctctggacttcagtgggacagggagggtgggcgtggtctccctccctcccagccccgccccctccccatgccccgccccagacagacacaggcacatctaggcgggagggaggatggtgggtgaggagggggcgctgggtgggtggggagaggggtgcagcgacgcggtgggccgagtccagacacagagaggacggacagacagacggacagacgggactctacttacgatcatctgtcatccgtgatgggggcggggcggtgggggaggggggaataaggtaccatgagtctcccgggaaggccagggagggggcagagatggcagcacggaggggcaagacccctgccccagcccagcccagaagaggtggaaggatgggaagtccgagcctccccgaccatcgtcgcccatctatggcccccgctcaccctccccaagcctccgtggtccacctgggaaagacctccccactccctaatgtgcccacagcccacatgccattgctgtcctcaggttcttgatgcctcccggagggacccacgcccagctacatccctctacagatgtttgggtccccttggtccctagagattatggcctctggtctatcggtcctggtctctggatggccaatgatctctgcttgacctctctgaccttggatgccctccatgacctctggctgacttccaggagccccttggtctattgatctctgatgtctgaagtccatggtgtctcccctctttggcttttgaatgagccccaaagcccttagaaaaacccattgatgtctatgccttctcttttttttttttgtttttttgagaaagggtctcgttctgttgcccaggctggagtgtgcagtggcgccatctcagctcactgcagcctctacctcttaggttcaaacagttttcgtgcctcagtttcccaagaagccaggatcacaggatcacacccagctaatttttgtatttttagtagagacgagatttcaccatgttgcccaggctggtctcgaactcctgacctcaagcaatctgcccgcctcgagcctcccaaagtgctgggattgcaggcgtgagccacggtgcctggccaatgtctatgccttccgtggctcaaggataaccttgatcccaaaattgacctgttttctagatgacctctgacctttgaaagctattttgacctacatgtgacctctatgactttagtggtctcttgactctacctgatgtctttgaccccagagaaaatacaatggactctgaatgacctctttaactcttcgatgatctttaacccctgtgtgaactctctgacctctgaatggccccccactgacctctggtggcttccatgacccttgaatggcccttgagcctggatgacctctctgagaccggatgcctttgttcttaccccccagcctctaggcaccaagttttctgggctctcgccagggaggtggcctaaatgtcccctcgggccccctgcaggtctcaccgtctggtcagtgaggggcggcaggacgatggttttctccatggtgttcataaccagcttccacagctccttcagcactcgcttcagcacagtcttctcacagattttggcaaagagggtcaggctggggacgaggggcaggtctgagagagggcccagctcgcccccacccacagatcaccttcccttaacaggtgggcaaggcattccacagataggaaagagggcccacagcctgtacagggacccctgggtggtttgatggggctatgatatctgatgcatgaagagaagagtgagtggtggttggactagtcagcagggaccagatgggaaggggccccaatgtctgggaggaaggcttgggttttatcaggatgggggtagtggggagccatggagtgttcaagagggagacacagccagactttcatgtttgaaagaacagtgtgggggatgaaccgaaacaggaaggatggagatcagggactatgagggagaaggccatgcccaagaggaacaggaggggaatggtcagaggagggcagacttgaaagggaaaacagcaaagagattgtggttggatggataggggttgaaggagacaggcagtccaccaagatccatccaccaactgatccagtcacccaccaatccatccctcccccagtggtccttaattctctatttctttttctatccatccatccatccatctgttcatccatccatccttccatgcatccttctacccatccatccacttatccatttatctatccatccacctgtccattcatccatctgtccatccatctatgcatcaaaacatttattcatccatccaaatatttctcacctattaatccatccatccatcgacccactcatccacccacccccccatctgtccaaccatttatgcatcaaaacatttatttatccatccaaatatttatccacctatatctatccagcatccatccatctacccacccacccatccaaccatccattcatccatccacccatctgtccatccatttatgcattaaaacatttattcaatgatctaaatatctattgacctatccatccatccattcatccatccatccatccagccagccagacagacatctatgcatcaatccatctatacatcaaaacatttattcattcatccaaatatttatccacctatctatccatccatctacccacccatccatttattcatccatccacccatctgtccatccatttatgcatcaaaacatttattcatccatccaaatatttatccacatatccaaccatttatccatccatccatccatccatccatccatccatccatccatcgtccatccaaccatccatcaagccagcctgccagacatccatccatctaagcatcaatccatctatgcatcaaaacatttattaatccatccaaatatttacccaactatccacccatccatctttttaaaacatctatcctccctctatccttctaaacatttatcttttaatccatgcgtccacccacctacccatccctcatgtcacctattcatccaccattcattcatccacacaaatatttactcaccaatccttccaattatttacccacccaactttccatccccttcatgccaccatctactcagccatccaactatccagtgaccacccagcaaacattccctgcacaccctctccagccagtccctgggtctctatggccctgccccagcccctccccggccagcccagtccacctggcccagctcacttgctgtccagcaggtccatgatgggctgcaacacattgtccgcgtcctgggccacgctgctgcaggcactggctggcacattgcctgtgcccttaacctggctaaggatgtcacccatctgtttgacacactcttcaatgtgcggctggaagctggggacacagaagggaagggctcagaccacaggaagggctggatgaggacacagatgctgatctgtggtccttgaggtcatatcatttgcatcacagcacataaccgagcaagaatggagaacaggccagatgcggtggctcacgcctttaatccaagcactttgggaggccaaggcgggcggatcacgaggtcaagagatcgagaccaccctggccaacatggtgaaaccctgtctctactaaaaatacaaaaattagctgggtgtggtggcatgcacctgtagtcccagctacttgaacccaggaagtggagggtgcagtgagccgagatcgcgccactgcactccagcctggtgacagaacgagacttcgtctcaaaaaaaaaaaaagagtggaaaatagtaactgcagaaccaggcaaagggataagacatttgcccgcattgttcatttcattctcaaaatcctacccaggtactattattgtcatcaccccaaatttacagagcaataaaaaaaaaaataaggctcagagaagttaagtgactcacccaaggccacacagctagtaagcagtaaagccaagatttgaactcagccttgtctaactctgagcctgcaatcttcacctctacatctgctgagcctccagatgccccaggcttagagggctgaaggctgttccctccccactgcccccagccctggagatgctcccacctggtagcaaacacccggctgagctcatccaagacgttattgagtttcacctgaagctccttcaggatgtcactggcttcagcatccagctaaggagggagaagggacaccaggccaggttcagtaagtatccacatgtactgggcattttctcatctgacccagggaaagggatcccaaggggctgcaggggaaactgaggcacagaccgttatgctgcaagcctgggtttaaggccatggttgagctggaattcatccccaggcctggtggcatatgagctcaggggcctgcagggacacagtggtgggggtgccccatcccttctccagccctgcctcggccctgcctcacctcctttcctcccatggcttcgaacatcttctccagctgaactcgtagctgttgagtgttattcatgagaatgcagggctgtgggtgggaacagagaggggagtcaagcctcaggacctctccccagagcctcccctacccaccgccagggaccttgggatggtttcagggtctgggtctggaggaagctggggtcccatggggtcacctgcaaatggaagggagcttttgtgctcaggttcctgggcgtgttgttggggcgggcatctctggggactggtgggggcaaggaggactcaagtaatcccacgaccccaggcctggtggggggtccatgagaggggctgggaactctgggagtagcagagtttcctgcaagagcccaaagctttgcagctcacaccctgaaggcttcatttgcaacagccagacagtgacacactgaaggcgtgtgccctcaccccgagatatacacacgagaccccccccacagatacacacactcagacatgcacagccagacacagccatagacacacactcacaccacgcacattcaacaccgccataccaaacctggtgagacacacccacccagacgtgcacaaacacacacacacactcacactatatgcagttaactcagccagacaaaacacggtcacacacacccagacatgcacagctggacacacacacaagcatacacacactcacactataaccagttaacacagctagataaaatatgagacacacacctagatgtgttgtatagttgaacacacatactcacacatacatacactcacactatacccggttaacacagatgaaacatggctagatacccacactcagatatgtacagacacacacagatacacacattcatgttatacccagttaacacagccagacgaaacacaatcacacagatacacacactcatgttatacccagttaacacaaccagacgaaacacaatcacacacgcacactcagacgtgcacagttggactcacacacacattcatgccataccctgttaacaaagccagacaaaacatgatcagacacgcacactcagatgtgcacagactcacacacacacacacacgcagagtataccagtcaacacagacaatacacagtcagacacatgcacttacttcccatacactcagacacacacaactagatacactctgatcacacacattcaaacaagcacctctaaacacacagacaatccagtcagatcacacacaggtggacatacatagccccaggtgtcagggccctggggagaagggagtcctggggatgctgaatggggctgaggagggagataggtcaggggccccctcaggtcaccactttctccttctccttggagcagtaggaggcaaagtccttggagatgatgtctgcatactggaggagcacattactgatggtctggggaagacacagagtgtgggtgagaggagaggctggcaccaaggcaggcgccagtcgtcccatcaaggccactagtgagatcagtgatgaacccaaaccctattaggacctaagatgggcctttgggctaggcaaattctccactcaagatgaccatcaagacctagaggagataccgctcgatgaagatgatcattttatgtagacccagctctttttcagagcaaccaagcatcatattaacccagcctcaaccacaagatgacctgatctcaaatcaaaagccaattcctacttgtaattcccaaggtcaacacagcctaatgccaatgaatcaaacctcaaccccaatgatcccaaccctcaaactcaccccaagactcactcaaattgtgcatcaatctcagcactcactccaatctcaattccaaatcaagacccagcacagcctcaaactccaaccaaacagcattgccaactcgcactaatgacctcaattccaaccctgatctcaacccacacctcaactccaaccttaccctacacctcaactccaaccccaatctcaactccaatctcaatttaaaccctaaccccaactccaacctccattcaaacctcaactccaacctcatctcaacctcaacctcaacccaaacttcaactccaacctcaacccaaactccaacttcaatcccaacctcaatgacatcaccaactccaacctcaacctcaaccttagcccatctccaactcagacttcaattccctaaccctgaccctgtcccctagccccaaccctacccactctcccacaccttggcaaagcgcctcatgtagtgccccacgatctgagggtcgggacactcgagtttcttgatgatttcaaagctctggttgagttgggagaaaacatccaccacggagcaggagaatagggcatgctctgaggtctgctggaactgcagggggaaggaggccaagaggaaggaggagatcagcaccagagaatccctagagcccaactctcccactctccacggggagagccagagaccaatttccccggggtgagatggacagagggcgaggtagacttagagtcaactctagaggtggacgcagaagccatggggtgcctggaggtgtccggcttgatggaactcacattttgtagttgatgaatgaacaaaagattttaaaaaccatgagcaagacaaagatggcggacacctaccagagactggcctcatctcaagggcaaatttccacctaaattgaccccagtgggaagattaggaacttggttgtgggtgggccttcttaccccatccttcttgtctcgctccagggcaccgtgcaggaaatcccgggacacctcctcattctcatccagccactggatgacgaagggttcaaaccatctggaatgaagagccggggtggggctctgccacctcttgtcctcctcaacctctgcgccgcctggttctgacccactaacgagtggagctatggctgctcctgctctgcctggagctctccctgcagccttgagtggctgctcctctgctcgcctcctgcactgaacctcagttactttgctcatgaaatagattgagtggccccttttacaacagggcccaggcctgtgggaatcctagttcagataagctgcccatggcaagtgggtttattctctgagtcctctctgagtcctccgtccatccttccctccctccctccctccttccttccttccttccttccttccttcttcagataaactgcccatggcaagtgggtttattctctgagctcttgttttctccctccctccctccctccctcctttccttccttccctccctccctcccttccttccttccttccttcttccttccttccttccttcctgggtcttgttctgttgcccaggctaaagtgcagtggtgcgatcacagctcactgcagccttgacctgctgggttcaagcaatcctcccacctcagcttcccgaatagctggcactacaggcacatgccaccatgcccggctaatttttttttttgtcttctttgtagagacaggatttccctgtgttgcccaggcaggccttgaactcctggcctcaagtgatcctcccaccttggcctcccaaaatgttgggattacaggaatgagccaccgcatccagccagagctttcgtttcttgtacaacagaagactagccatcctcctgtgctgctgggagcagagaacgacaccacaattctcaggaaccggcggcaccgtactatcctccaacacacagcccaggaatcagatgtcccgagttcaaatctcgggtctgtcatgtactgggagtcaccgtgggcaaggaatgtggcatttattcactcattcattttatttttatatttatttattttttgaaatggagtctcactctgtcgcccaggctggagtgcagtgacacgatttccgcttactgcaacctctgcctcctgagttcaagcgatcctcctgcttcggcctcccgagtagctgggactacaggtgtgtgccatcacacccggataatttttttctttgtttttgagacggagtctcactttgttgccccagctggaatccagtggtgcaatctcggctcactgcaacctccgcctcctgggttcaagcaattctcatgcctcagcctcccaagtagctgggattacaggcatctgccaccacacctggctaatttttgtatttttagtagagacagggtctcaccatgttggccaggccggtctcaaactcctgacctctggtgatccacccaccttggcctcccaaagtgctgagattacaggcatgagccactgcgcccggccaatttttgtatttttgtagagctggggtttcgccctattggctatgctggtctcgaactcctgacctcaggtgatctgcccacttcggcctcccaaagtcctgggattacaggcacaagccactgtgcctgacccattcattaattttagagatgggatctgactatcttttccaggctggtctcgaactcctgggctcaagcaagtcctgcctcagtctcccagattgccggggctacaggcatgtgccaccatgcctggccatttggcatctttaactctccaatttctcctccgcaaaataggaattaaaatgatcccaccttaactcatagaattgtcaaaaggataaaatgagaaagtcacatggttcctgttgctgttgactgaattttctgggctgtaggagtcaactgctcaatggctgagagtggagaacactggattcaagccccacccatgcccctgatgcccaggtaaccctaagtaggtcagtcttcctctctggctttccttctagctgtcagtgctacagttctggcttgggttgggcctggggcaggggacttacgcagggtactcaggcacgcggtccttgaaggcgggaagttccgtcacatactcattgtagagccatttcaccttgaagtggaggttcatgtagtcggcactcttgcatagacgatgcttgtcgtgctctggccagggacaaagaggatggcacagctggaagggtctgccaccctctgtctcggcagagaggctgcctactctggccatcactgatttccaactcaggcatgagggtattatagggtgctcacagccttggaggggacacagaggtacagccacctggtgtggccaggctggggaacactggggtgggaaactcaccctccatggcgtacttcatgtcttgggcaaacagattccacatcacttcagcgctgattttacccacattcagctcctggggaaacctggcaaagtcatggaagtataaaactttggcaggcagaaggcagatgggatgggctgctttgtccttccctgccccacagaggagtgtagggtagggtagagggatttgggttcaggttccctcatagccactgctgactgactctgcactaaggctttgtttccctttgagcctccacccactcatccatttgtccctccattcattcattcatccactcatgcaactatccacccatacattcaacaactcatttatctattcctccatccattcatccatccttccatccattcattcacccactcatgcaactgtccacccatccatgtacccatctatctattcatccatccacccattatccacccatccaaccatcccttcatcaattcattcacccactcatgcaactatctatccctccacctacccatctatctattcatccatccacccatccatccatccctctatccattcattcacctacttatgcaactatccacccattcattcacctatccatctatctatttatccatccatccctccatccactcattcactcattcatccaactattcatccatccactcaaccacccatctatctgttcatccatctatccctctacccattcatccaactatccatccatccacctacccatctatctattcatctatccacccatccatccatccatccctctttccattcattcacctaattatgcaactatccacccatccgttcacctatccatctatctattcatctatccatccatccctccatccattcatttgctcattcatccaactattcatccatccactcaaccactcatctacctgttcatccatctatccctccacccattcatccaactgtccatccagccacctacccgtctatctgttcatccatccatccgtccatccttccatcatccacctatttatctgtccttccatccattcattcgcccactcatacaactatccacccacccattaaatgacccatctatctattcatccatccacctatccatccatccctctatccatttatttactcacttatgcagctatccacccatccatttacccatccatctgtccacccatccatccattcctttttttttatttagagacggagtctcactctgtcacccaggctggagtgcagtggtgcgatttcagctcactgcaacctccaccacccgggctcaaatgattctcgtgcctcagcctcccaagtagctgggattacaggcgcgagccactatgcccggctaattttttatatttttagtagagatggggttttgccatgttggccaggctggtctcaaactcctgacctcaggtgatcctcccgcctcggcctcccaaagtgctgggattacaagcgtgagctgccacacctggcccatccgttcctttatccacacagtcatccttctaccaatctatctgtccatctgttatttacttatttatttagagacggagtctcgctctgtcaccccaggctggagtgcagtggcgcaatctcgactcactgcaacctctgcctcctgggttcaagcaattttcctgcctcagtctcccactagctgggattacagacgtgtaccaccacgcccggttaatttttgttttgttttttctgttttttttgagacggagtctcactctgttgcccaggctggagtgcagtggccaatctcggctcactgcaagctccacctcctgggttcacgccattctcctgcctcagcctcccgagtagctgggactacaggcgcccaccaccactcccggctaatttttgtatttttagtagagacaaggtttcaccatgttagccaggatggtctccatctgacctcatgatccgcctgcctcggcctcccaaagtgctgggattacaggggtgagccaccgcgcgtggccaatttttgtatttttagtaaagatagggtttcaccatgttggccaggctggtctcaaactcctgacctcaaatgatccacccaccttggcctcccaaagtgctgggattacaggcgtgagccactgtgcctgaccccatctgtttattaatccatccattcatccacccacccttcaatccatccaaatccctgatcttaattccctaaccaggatatgttaacgccccaaagctagagtcctctctagcactcatctggcagagaaatagaacacagtagctcattcagctaacacagatgaaaattctacagacatataaatccacaaatgaaaactgtgcccatattcatacacaatacacaatattgtatattgtacaatattgtacgttgaattgcattcaatgattttacacatatacaaattaaacccaaaacccactgaccacaacaatatacaaaattacttacatccatacatataagatataatgcaatttaaatgtatgatatgtattagggtagcacatagtaatacttgagcaacactattattaattaacctacatacacataaaaaattatacacatatgtacacacagttatgcatgcaaatgaatacatacaaaatacatgtctgattataccagtgattgtgaacatacacacaattttatgtttatgtttgcaaattgtacccatatttgaattttgcacaggtataatcagacccacaattacccccaggtgcacatttgtgtaattagacaaaatcatcttgacacacaagacacaaagttgtatacatacacacgatgacacccagataattaactacacagatacacaactcactggttgaggcagggagtgtaggaattcttgtcttcctcaatgatggacactatgagggtaatcagcttggaccagaagtcgaggttcttgatgctgggcccctgttcctctgggagaacttcccccttcttggcctgaaatggacagtggagacctcggttatagggggtccagaggttggtgcctcggtcagtttattactgaagaacaagaggttttagaggaatgcatcccatcatcatgtgtatggttcaggtaagaaatctatatagagaggaattgaactcataaactggcccaaacagagctcatgtcaatgcagcttgataaagcttaagatttttagactccactctaaaagtgaatggaaataaatgaaaccaaatttagttgaacaaacccagctccactaaaccaaatggaaatgaaatgaatgcaaattaagcccacttagcttaacggaagtaagttcttcctctgagttaaatcaatggaactgaacttgggccaatcacactgaatggagtgcaattcaacctaactggattgaattaaactcaaatgaattccgttggattgaacctaatcaacttgtccaagatcaacatcaacccaaatcaaaataatggaaataaatcgactcgaactcaactctacccaagtcaacccaatccgattctacctatctaaacccaactgaacatacgcagggcaattcaacccacctttgttaatcaatggaaatgaatataatcagctgaaattagcccaattcaacccaattcaactgaaatcaattgcatctaatccaacaacccagttcatcctaactcaagacaatttaacccagttgagaacaacttgacttgaatgtaaatgaactaaatggaaatgaatgaatttgtactcaataaaactcaatgcaatcaaccaacttgttcttctctctattttttttttttttctttcaagagacagagtctcattctgtcacccaggctggagcgcagtggtgcaatcatggctcaccatagactcgaactcctgggctcaagtgatccttccacctcagcctccaaagtagccaggactacaggtgcgccaccacacctggctaatttttgtatattttgcaaagatagggtctcgctatgttgcccaaactggtctcgagctcctggcctcaagggatcctcctgcctcagcctcctaaagtgctgacattacaggtgtgagccactgagcccagcctggctcactaatttgtcaagaacaattttttttttttttttgagacggagtctcgctctgtcacccaggccggagtgcagtgatgcgatctcagctcactgcaagctctgcctcccaggttcacaccattctcctgcctcagcctcccaagtatctgggactacaggtgcccgccaccacgcccggctaatttttttgtatttttagtagagacggggtttcactgtgttagccaggatggtctcgatctcctgacctcatgatccacccacctcggcctctcaaagtgctgggattacaggcgtgagccactgtgcctggccgtcaagaacaattttaacttaagtcaaccaaatagaaataaatataactaaactgattatggttgaactaaacaatctaatttaatccagttcacctcaactcaattcaaatgagagtgagactgattccaactctagtcaactgaatgtaaaggaacagaatgaaatcaaattgaactgaacacagcttatgtgttatatcctatcagaacctgggtaggggctgcctccagctcccacagcctcctgagatcccactatctcaatactaaccatccctgtttgtaaatttccagtttgtacatctttccctcataataggctataagctccttatagcctaatttaatccagttcacctcaactcaattcaaatgagagtgagactgattccaactctagtcaactgaatgtaaaggaacagaatgaaatcaaattgaactgaacacagcttatgtgttatatcctatcagaacctgggtaggggctgcctccagctcccacagcctcctgagatcccactatctcaatactaaccatccctgtttgtaaatttccagtttgtacatctttccctcataataggctataagctccttacaggtggtggctcatgcctgtaatcccagcactttgggaggctgaggcaggaggatcgcttgagcccaggagatcagcctgggcaacatagtgagatgccatctccacaaaaatacaaaaactagcctgtcatggtggtgcgtgcctatagtcccagctacttgggaggctgaggtgggaggatcacttgagcctgggaggtcgaggctgcagtgagccatgattgcatcactgcactccagcctgggcaacagagcaagaccccatctcaaaataaataaataaattcaattcaactcaacatttactgaacagtgactgtatgccagacataaatttttatgccaggctgggagtggtggctcacgcctataatctcagtactttgggaggccgaggcaggtggatcacctgaggtcaaggagttcgagaccagcctggccaacatggtgaaaccccgtttttactaaaaatacaaaaaattaactaggtgtggtggtgggcacctgtaatcccagctactcgggagtctgaggcaggagaatcatttaaacctgggaggcagaggttgcagtgagctgagatcacaccactgcactccagcctgggaagcaagagtgaaactttatctcaaaaaaaaaaaatttttttttatgccaaactcaactacgcaaccaaatgtactgagtgccgactatattttatctaaacttacagctcatgaactcttctccctaatcctgagatgtgggttaatgaccccattttatagaagaagatactgaggttcagaagagttaaatccctcgggaaggggcagggctgggactgaagcctgtgtctagttggcatcactgttcccttctgacccatctggagtctcaccgggtctgtctggtactcccggctgtacagttcatggcagttattgaagatgtactcgtaggtagaattaaggcaggctttcacacagtcctttaccacctggctggctcggggcgggctctggagttcttgtacctgaagggagggagagaggcataggcggccacagctgtgacaggaggtccccaggaagtgactgcgagtcattttgggtttaaggaaatgaagtggtatgaaaggaaaaggttactgagaaaggctgccactctccaggaggaatgtcacttgtcctgggagctggggatcctagagaaccctccttggagagcaaaggcaactggatcctttcctaccttcatccgaaagaaggtgatgctggtgagaaggtccacagtggatttgaggtcctggagtctctccgggctgctggctgggaagttattctgttgggagcaggaagagatgtggggttatggaagaaggcgtggggaggatgggagactgcttttcagggggatacaaaggctccccggtttcaggctgggggttgattagagcacctcgaagcaactggggatctgcttggatgcaccaagcacattacggcaggtagtgcccatgcaggtgcacacatgctggaggaacacatcgtacatgcgaagatgggtcctcccatgcacacacctgctggtagctttcccctccaggcacacacatgtgcgtggggtgagcaaattctcatgcacacacttcctacccggtacatggagaggtcaatccgcagggagttatgcagctggtccaggagtttcacgaagcgctctttctgaggaggaaggggaggagggaggatggatggaggcaggacatggccgccatagtggctgagcgcctactgtacagtaagtatacctcatccaccaccctcataatgtccatttccattctatggcatttttttttttgttttgagacagagtcttgctctgttgcccaggctggagtgtagtggcgcagtctcagctcactgcaacctccgactcctaggctcaagcaattctcctgcctcagcctcccaagtggctgggactacaggcacaggccaccacacccagctaattttcttttggatttttagaagagacgggttttcaccgtgttggccaggctggtctcgaactcctggcctcaagtgattctccagcctcggcctcccaaagtgctgggattacaggcatgagccactgcgcccgacctccattctatagcattctacagaggaataaatggaggctcagagacgggaagtgactggtggaaagtcacacagcaatcaggtctagactggggacccagaagtcacatcagatctgaccggcataaagttgggctctccctaattctccaatcccagtccccaggactgaccccaaagttggaggcggcgaagcggtcggaggcagacacgttggtggaggcggtggtgtgtgcgtagtaggcattgatgttggcgagcagggtgctcatgacggcaggcacccctgggcacatatacttggaggagaggcaggcaaagtggctggagagagggagcaggaggcactaggccaggggtccagccaggatggaccaagatcccccctagaatgcctccaagatagcatctgtgagtgggtctctgtcacctcctaaaccatcccctgcctgattctgtcctttgggtctccgcatctcctctcccctccatctttatatccatttgagttgctctaattctgcttctttttttctttctttcttttttttttttttttgagatggagtctcactctgtcacccaggctggagtttagtggcgcaatctcggctcactgcaacccctgccccccaggttcaagcaattctcccaccctaacttcccgagtagctgggattacaggcccaagccaccacacctggataacttttgtatttttagtagagatggggtttcaccatgttggccaggctggtcttgtactcctggacctggagtgatccgcccacctcagcctcctaaaatgctgggattacaggcttgagccactgtgcccagcctctatctctgcttctaagtcttccctctcttccatgtcactccaggtgtcaatcacagcgctctcctgatctccaggggaattacggaacccaccaccaccacgcccacttcctctctgggtcttccccctgagaatccctcccaccccagacctgccagtgcccacttggtgacctccctcttgtttcctgcaccccagcctgcagtctcacgtcatggcttggtagatggactcgacgccgtagcgcatggcaaactcgtccacaatctcctgggctgtctcatcgtagtaaaccttccaggcatcgtcacccttggcatctgggatcttcacgaccccattgttctgcacgtcggtcacgaagtggaacaggttctgccaccatgggagagaaagtgtcatggagagtgcaaggggtcgccgggggtcagaggtcccagggtctggggcagcttacatcatccatctgcctgtttattcattaattcattcatctactcttttatccatccacacacccacccatctaactaccccaaatttcacccatccactcttccaacctttcagtaattcaaccacacatccatccatccatccattcatccatcccatacattgatccgcaacttaatccacctacccaatcattcattctttcatacaaccaaccatccatccacccatcaatttatccaaccatccatttttcgtctgtccaccagccactcacaaccatccatctaaatattcagaaattatgaacccaattatcaatacttgcaatagttcaaccacacatccttccattcatccacccacccattcatccatttgtccatctgcctatacatccatccatccatccatccatctacctatctacccatctgactatcaacaaattcacctatctactcaatcttccttctaataactcaaccacacttccatccatcccatccaatacaacttaatctgctcatccaacatttcatctatccacccagtcaatcatctatccagcaatctatctatccactcatcaagttatccatccatcattcatctatactcatccatcatctaacaattacccccaaattcacccatccatacatctatactttcaatagttcaatcatatatccatccatctgtccatccatccatcatccatctagccacgaatctacccaccaactcatccatctatccatccatgtactcacccatctctccatccatccttttatctactcatcactcattcatctgttcaatcattcattcattcaccagcatttattcaacaaactagttcctggggataagagttctttccaggaaacccaggcagctggaagagacatacccagacacaaacggcccaatcctgagtggttagggctggaatagaaggaagaacctgatgatgagtagtgagagtcaacctggaggccaaggtgggcttcccagaggaggtgaccctgaatctggactttgatggatagggaggagttttccaggtaaagggaatggcatggcgggcagtctcagagggccaggagagtgtggatggtgtggccagaaagaggaagagctgggcaggcaggaatggtgagtggaagtggcatgggaggggccgagcaatgaccctcacctcatgcagacaggtgtactggacatggtacggggccaccttctcctcgcctttgatctccacactgatgtggagccggatggcacccgacacggcagatttgtcagttcgcttgtctgcagggcagaaaaagaagacagtgtcagaacttcccactatagcagtgggcaatttttttttttttaagagggagtcttgctcttgtcacccaggctggagtgcagtggcacgatctcagctcactgcaacctccacctcctgggttcaagcgattctcctgtctcagcctcccaactagctggaattacaggtgcctgccaccgtgcccagctaatttttatacttttagtagagacggggtttcaccatgttggccaggctggtctcgaactccttacctcaggtgatccacctacctcagcctcccaaagtgctggaattacaggcgtgagtcaccgcgcccggccagccatgggcaaatttttttttattttatttttttttgagatctgtggtccaggttagagtgcggtggcgcaatcttggctcactgcaatctccacctcctgagttcaagcaattgtcttgcctcagcctcccgagtagctgggattacaggcatgtgccatcacacccacctaattttttatttttagtagagacgaggtttcaccatgttggccaggctggtctcgaactcctgacctcaggtgatccgcccgcctcggcctcccaaggcaatttttaatagatacacgattctgtagtcctcccagacttccggaaactaaggctttggtgtctctcttctgattggctccctaggcttgagtctccctgtttaggctagaattccttaagccctgtctcttccttcaaacaaggatcccagaccttgcttcttcactcagattaagttcctggctatgtgcctccctccttagactagcagccctaggccccacttctttcccagtctgagctcccaggccctgcctcccccatcagatcatgctccccggagactacacatcttagacactgttcctgggtctgtgcctctctcctcagactaggaccccctggtcttgtctcccacctcccccatcagaatgggatatctagatgtcctccaatctaagaggtttccgggctctgctcacctctctcaggctgggtcctttctaccccctcagattaggctcatacaccctgcttcctccattagattggactccccagattctactcaacttccttacacagggttctttgatctgtagcagccatctcagattaggattcccaaacaatacctccctctttagactggattcttttcttgtggtggggggtcggggggacacagagtcttgctctatcgcccaggctggagtgcagtggcatgatcatagctcactgcagcttcaacctcccaggtacaaatgatgcttccacctcagcctcccaagtggctgggactacaggcacgcatcaccacacccagctatttttttttttttaatggagacaaaggccttgttatgttgcccaggctggtctcgaactcctgggctcaagtgaccctcccagctcagccacccaaccaatatgttgggataacaggtgggagccaccatgcccagcctggattccattttttttttctttttcttttgttttttttttttttttttgagacggagtcttcctttgttgcccaggctggagtgcaggggcttgatctcgccatgttggacaatctggtctcaaactcctgacctcaagtgatctgcctgcctcagccgtcccaaactgttgggattataggcgtgagacactgcacccggccatatttgttttttgagaaagggtctcactctgttccctgggctggagtgcagcagtgtgatcacagctcactgcagcctttacctctcaggctcaggggatcctcccaccttagcctccagagtaggtgggaccacaggtgagtgtcaccctgcctagctaatttttgtatcttttatagagatggggtttcactatgttgcccaggctggtcttgaactcctggactcaagtgattggcctgcctcagcctcccatagtgataggattaattacagatgtgagccactgcccggcgcccccagcctggattcttttttttttttttttgagtgggagttttgctctcgttgcctaggctggagtgcagtggcgcagtctcagctcactgcaacctccgcttcctgggttcaagcgattctcctgcctcagcctcccaagtagctgggactacaggcacccaccaccacgcctggctaatttttgtatttttagtggagacggggtttcaccatgttagccaggctggtctcgaactcctgacctcatgtgatctgcctgcctcagcttcccaaagtgctgggattacaggcgtgagccaccatacctggccccagcctggattcttaaagctcaatcttctttcttagatttagttcctaggtctctgtctctcccctcagactaggattcccagttcttgcttcttgcctcccccattagactagaacatggagattctgtccccaccctccctcctaagctgaactaagaggttcctgggctctgctcaccctcctggcctgggtgcttcctgctcccatcaaactgggctcctagaccctgcctcccccatcagattatgctcctcgaccaaactcctcctgagaacacatctctctgctcttcgtgggctccatgctctggctggatccctgggacccgtccccacccgcttcagaacccagcttctctcacccaggttgtaccacacgtccatctcgccgctgagcgtccgcacctcaatgatcgtctgccccaggaaatcgtcagattccctcttgaacctctgtttcacgcgggatttgatgtcgtcatcctcgtcccagacgcgcaccttgatgcggtcggaggaattgtgacattcactgtggcgggaggaggaggcagaggcaggggtcaggcagccagtgtgagtcctgtccttggagccctcttttggctgccccagcaggatgccccacatggggccagggacccagccaggcacttacaagtggaaattctcctcccacaccgggttgaggttcccatagatggtttttgtccgtttcttggtcttcccgacctggacggtgacataggggtcactggatcctgtcttgtcctttgcctgcaagccctgggcgcagaccactggaagacacagagggcatacacaggtgtgcactcaagaagcgaggcatgctggggacagtcactgccacacgctgcaggctgataattgggacacctgcagcatggctggagagcaatggcagggcacgctgggcttgccagagaggttttttgtgtgtttgtttgtttgtttgtttgtttttgagacagagttttgctcgtcacccaggctggagtgcaacctccgcctcccgggttcaagcaattctcctgcctcagcctcccaagtagctgggattacccgcacgtgccaccccatccggccaatcgttttgcatttttagtagagatggggtttcaccatgttggccaggtcggtctcgaattcctgacctcaggtgatccgcctgcctcagcctcagcctcccaaagtgctgggaaggagtccccaaaccatgaaggatgggaaggtgccccagctgccttgcgcatgggtaggacctctctcaggtgtgaactccctgaggtcagacacttacaagaacccattgccccccgagatctcctgctcgttggtgccccctgcagggttccttccctccctgacttaccaccccagctccgtcctggggtcacttcctggataacccacataacctgaaatcctcatcctcaggtctgtttatggggaaacccacatgaggctgggtgtggagaaaagccagtatcctcgcccctaagtggggccacactgagctgcatgctcgacattgtccccagtggccccaggatgggctgacccccttgcccacagcattgtctgctcaacggcatctccttcaggactccttccatccctgtctcaagtccttgcccctcaccaggactttctggggtcactttccagataaaccatgcaccctcaattcctcttcttggagtctcattctggagggcaccatccaagacgcacccagatacagtgccatgaacaggcgtttggaggcacgcatgtccccccatatgcgtgcacacacggagatgagatggaatgcacccgaccgagtgagtgcgcgctgcaaaggagagggaccaggccatgggacagggcatgagacaggtctcagagggtggagaaggaggggccctatggcggcccacgccccctcaccggtgatgctgatcttggcggaccacttggacgtgccgtccagcacgctctgcttgaccgccttcatctgctgcgtgtgcgccgtcttggtcaccgcgaagatctcctggatgagctcgaagatctcgggcttgttgcgctcccggatcttcatgcggtccttgagcaccatgatgatgttctgtgtccggtcctccgccccgtgcttggagctcttctccgcagcccctgaggacgcccgaggccggcgctgaccccagcgcgccctgcatagtggcccctcaccaaggcgagagccccgcccctactcatcaaccggggggactcaggtgtcaccccctgaagccggtttcctacctgctttctgtaccccccacccagacccttcacccttccacctcctctcggagccatgctcctctgagtcgccatgtccctgcgtcctgcccttctctgccccgcaccccttggagtccccactggtttttggagccccacccctctaaggcctcttccctaagccccacccctctgagtccccgccccctctgcgtcccacccctctgaatctccgccccctctctgagtcccacccctctgagtcccgctgcctctctgagccccactcctctgaatcccctcctcgtctctgatctccacccctgcgagtcccctccacattcctgagccccttccatctctcagacccctccctttctcttggtcccacctcctctgagtcccctcccccttccaatccccccctccacagtcctctcgcagtctgaaccccttccctctctgagcccctcttcctctcagagctacccctagctaacccattttatccaggggagctgcctcttctcactaagcctgtcctttgcacaacctagctagtccctgagccctgccccacccctctctgacaccctcacagcttctttccccacccctcgaccccctagcccttccaccagggagtcctgcgcctttaaccccacccctccctttcagcgagtccctcccctgcctcacgacgccccgccccttgccccgccccatggtgccccacccatcgccttgcccttcagcctttccccgccatgcaagccccggggctccccacgccaacccgtggccctgcgctcaggccctgcgctcacgctgcaggcagtcggcgttgagcaggtcctggcacttctcgtggcacttgacaccgcactcggtgcagcgcatgccctgcctcgcgatgccccacagcagcccctcgcactcgtagcagtaggtgggcgtggtggccgtccacacttcgaagttgtgtggcgtcgtgcacgagatggggtagattaaggcttgcagggtcttcttgtaaacgtggtttttctgcagggagggatggggtgcggtttgggggcgcctaacctggcgctgtccctgtcctgccccattccgccccatcactgagcgcggtaaagtcccaggccctcccctgcctccacgctgtcggaatccacgctgccttctgccagtctgtgtcacacacacacccttcctcttcccggggacccacagaggcttggacaattccagaagctcctagcccagtccatccctgacccggggaaaaagaggtgccccacgcaccagctcctcgttgttcaacgtgctggaggccaaggccgaggtgatgcccgctttcctggactggaccagggactggggaggtcacagaagagggagtcgggggggttgacatccatgagatcaccaccaggagagttcacagccacggatggggccagcagccacattttggagccacaaccgcaagttggaaacaggtcaccgacagcatccgggccagacccaacaaagaattaggaggtgacagaggctttgagttagaagggaccctggaaagtgagcagccccgcacccctgactcacagcatccaacacagtgggacatggcaaggttcccccataatccatgaattgggggcctgttagaagatcccagtgggggagtttggggagaagatcccaagaggcccatgtcgccatcactcaccatggcctgaagtgtccacgcagcacatgggggtagaaatcagactacattagtctcagagaatgcctagctggcccccaaccccaggttgaccatgggcagttccacaggttgtgcactgcttatagcaggcctgctctgctcagggagtaaagggcgagggtgcttaccaagtcgctcacgagtgggataggtttcctcttgcggatgtctggcatgctgtcgatgatgatgagaccgccccctgggctgaaagacacagagggacactgagggcccagatgtccctattcctcacatagagccctggggagaacattcaacctcccccaggtgttaaggggttgaattgggtccctcaaaaaaaagatacgctgatgccctaacccccactacctcagaaggtgaccttacttggaaacggggttgtcacagatgtaattagttaagataaggtcatactggagtagggtagacacttaatctaatatgactggtgtccttagaagaagagatacatggggagaaggtggctctgtgacagcagaggcagaaagcgacgtatctacaaaccaatactcgggggccaaggaattcaagcaaactagaagctagaagaggcaggggaggaattctcttctacagatttcagagggagcatggctctaccaatgccttgatttcagacttctggcctccagaactgtgagagaatacattgctgtggttttaagctacccgtctgtggtactttgtgacagcagtcctaagaaatggagacacccggcctcaccctcctcatctgaaaaatggggagatgatgtaattgcccaccttgaatgaaaacgtgaattaaggcaaatctaaataatatactaaaatataaatgaggccaggagtggtggcttacgcctgtaataatcccaacactttgggaggccgaggcgggcggatcacctgaggttaggagttcgagaccagcctgaccaacatggtgaaaccccgtctctactaaaaatacaaaaattagccaggcatggtagtgcatgcctgtagtcccagctactcaggaggttgaagcaggataattgcttgaaccaggaggcagaggttgcagtgagtcgagatcacgccactgcaatccagcctgggtgacagagcgagactctgtatcaaaaataaaataaaatatagatgaaacctttcttggctcattgcaacctctgcctcccaggtttaagcaattctcctgcctcagctccccaagtagctgggattacaggtgcccaccacaacgcctggctaatttttgtatttttagtagaaacaagctttcaccatgttggccaggctggtctcgaactcctgacctcaggcgatccgcccaccttggcctcccaaagtgctgagattacaggcgtgagccaccatgcccagccatctttcgaaacaagatctcactctgtcacccaggctggagtgcagtggcacaatcacggctcactgtagcctccacctcctgggctacagcaatcctcccaccttagcctcctgagtagctgggaccataggtgtacaccgccacacccagcaaattttttttttttttttttttttgagatggagtctcgctctgtcgcccaggctggaatgcaatggtatgatcttggctcactgcaacctctgcctcctgggttcaagcaattctcctatctcagcctcccaagtagctgggattacaggtgcgcaccacgacacctggctaattttctgtatttttcgtagatatggggtttcaccatgttgaccaggctggtctcagactcctgacctcaggtgatcaaccgcctaggcctcccaaagtgctgggattacaggcatgagccactgcacccggcccacacatagctaattaaaaaaaaattcttttgtagagatgggggtctcgctatgttgcccaggctggtcttgaactcctagcctcaagtgattctcctgcctcagcctcccaaatagctgggattacaagcatgcaccaccacacctggctaattttttgtatattttagtagagacgggattttgccatgttggccaggctggtcttgaactcctgacgtcaggcgatccacctgcttcagcctcccaaagtgttgggattacaggcgtgagccaccaagcctggccccgaaaaggttttcactggccagtgagataggtgcctgcagccaatgactccagacaagccctgcagggctattcaacctacaaagctttctgcaggagccaactgaggcttagagactcctaaaccacatcttttctcggcagcctccccttgtctgacaggtttctcccgagagcacatccttcataaatcacgtgcacaggaatccgcatttcaggacccgcatccaaggctctctagctagggtacctgctcatttatttaggagtcccagctgctgtctccctgcctgtttgccaaggacgtacaaggaaggtcactatcgtgctgctattttaaaacctgagcatatttttaaaatatcttgtgcatcctctaacctgaaaatccataacataagaggttagacatgaccacattctccactgaagactaaacaactatctttaattaaagagcccacaactgtagcaataatcaaagagatttaaaaatagaatcaacgcaaaaattttgctccaggattacaaatatatagtgtacatttcccaatagtgtctagttcctcatagtgtctgctttatcttacatttatttatttatttatttgtttgtttatttttgagacagtgtcccgctctgtctcccaggctggagtgcagtggtgcaatctcagctcactacaacctctgcctctcgggttcaagtaattatcttgcctcagcatcccaagtagctgggattacaggcgcctgccagcatgcccagctaatttttgtgtttttagtagagacagggtttcaccatgttggccaggctggtttcgaactcctgacctcaaatgatcctcccgcctcggcctcccaaagtgctaggattacaggcatgagccaccgcaccccgccctgtcttcaaagattactgtcttttgtgtctgcgtatggctgtgtgccttatgaaagtgacgtattttgcccaagctcaatctgtcccctgtctaaatggaacccctcctcctcctctctgggctgaggctcaggcgcaaaccagccttggacttggggttcaaatcttcctcccaccgctcacagtttcattacttacccgcctttgaaccatagggatttagacatctctccttctccccgggcctgcaggacagacagacagatatggtcagtgtggctgtccctcccctccccagagcaggctccacacccacttctgactcccctctgggctgggagtcagatggcctgggtcctagtcctggctgagtgattttaggaagctccgtggctatctctgggccttagtttgtccatctgtaagatgggctgggggagaaagaagctcttctctttcaaccacctcaatggacctcagtctcttcattgattattccctaaaccccctatagtctcacttgttcatctgctctcttgcctcgggctctttccaggagttgtgacttcagcttgtacctcttcccaccttctgcagccaaccagcctctatttatcattcgggtctcagcatagacgtggggtccacagcccctaccttccctccatcttgtaactaaagggttaacatggggggaggggtggccctatgaggaacacaggcagcactcttctgttctgaaatattgagggggtgtttggtttttttttaaagacagggtcttgctatattgcccagactggtcttgaactcctggcctcatgtgatcttcctgcttcagcctcctgagtagctgggaccacacacacaagccaccacactcagctcctgaaataaatatatatatatatattttgtttgtttgtttgtttgagacggagtttcccttttgttgcccaggctggagtgcagtggcgcaatctcagctcactgcaacctccacctcctgggttcaagcgattctcctgcctcagccttcctagtagctgggattacaggtgcccaccaccacacccaattaattttttgtatttttagtagaggtggggtttcactatgttggccaggctggtctcgaactcctgacctcaggtgatccacccacctctgcctcccaaagtgctgggattacaggcgtgagccactgcatccggctctgaaatattttttatttttttcttttagagatgaggtctcactacgttgcccaggctggtctcaaactcctgagtgcaagtgagcctcccgcctcgacctcccaaattgctgggattacaggcatgagctcctgaaatattgttgaaataaatattttggatatcacttctctttttttttttttttttttttttgaaatggagtctcgctctgtcacccaggctggtgtgcagtggcgcgatctcggctcactgccagctccgcttcccgggttcacgccattctcctgcctcagcctcccgagtagctgggactacaggcgcctgcaaccacagccggctaatttttttgtactttcactagagacggggtttcaccatgttagccaggatggtctcgatctcctgacctcgtgatccacccacctcggcctcccaaagtgctgggattacaggcttgagcaaccacgcccggccatcacttctccttaagtgtcatctcctccagggagttttcctgattgccttggattagttttatgcttttcctatgaaacccagagagccttccatgtgtctttttcttgtcatattactagttccatagtttgtttttcttgtatatcacatagttccaatagtagctgctattttttcaatttaatttcttgacctagtggaagttatccaacagccttttcactgtgtcctcttccacctgtctcatttagaaccatatgtatgtactgctgagtcaaaaaatagatttctattttaaaactgttaagaaatttcgtttggtaattttgtggctctgatatttgatggtctaaacctttgggagtctgtttagaatctcctcctgccaatcccactgcagtttggagggtaactctgaagagcaacacagctgtccccagcccagggtgagctgaatgaaggaataaacgaatggcctcaaccctgctgcccatctaaacagtcagcttgcccctgatgctgattgcttcccttgattcctactcccctactgagccggccccagacctttccctaaccctgacaatgacctccaatttggccctaagcactgacccctttgcctaacaccaattctaaccctgacctctgatctttgatggctgaactaaccctgaccttgatccctaaccatgacttcagcccagtttcagccctagttttctctcctccctctagatctagaaaccccaggctgacattgggaaggaggctgggctggggatgtgtggggccagacttggtgcatggtttgggagttagcatagccaggctggtgtggacgggccatggggataccctgggctgtgtgtgtatgtggctaaggaagggtcagagtgggtggggcatcggtgacattgggtgaggccaggctgaatgagggtggggccagggaagggctcgagtggctggggcatgggcacagtgtgggcactgcactgggcatgcccaggctaggcttgggtacgggtggggtgttgggcgtggccaatataggtgtgggtgtggccaaaacatgtgtgggcctgccattgggcgtggcctggctaagtgtggcaggggcatggctgggcgtgtcactcacctcctgcagctgcatccgcaccttgttgaaggcacgcagccagttggccttggccctggacatggagtcctgcccctcctggccttcctcatcctctctcggcctgaaactgaggcagggaacgctatgaggctctgggctggctctccgtgacccctgaacttcccttgaccctccagctgtgcaagtgatgcatagctccccatggtatctctgacccctcagagacattaggacccacgtgagtcccctggcccacctcagtgcccctcaccccttcccacacacccaatgcttctgtgacacttcactgttcctcggcttccttttcaccagcccagcccctctggccccccatttgcccaggatcttgacctctccgaccccagcaaccactaagatcacaaactctaagtctccttcacggccccttgaaccctctttgacctccctactctgccctgtcacctctgatccctttaagaaacccaagagcctgtgacaacttcagccccagcaacttcccaggtccacgctgaccccatcatagccctgctgaccctgtgaccttgtggcagcccctctggccccttggccccgtcctgttacctctcctcgtccttgggtggctcagcctcagggatctgctcagctgcaggcaccttgtcgggcgtggctggcttgggggccaccttggccatgtcgggggcctcggtgggtgccactggggccttgtcctccttccctggggcagctggcgggaggctgatgcgtttgaagtctttgggctcagccacagctacgtcttcacgctgggcatagctgcccaaatcgtcaggcacctcctcctcctcctcctccagctcctcctcatcttcaggcagctcctcctcctccaggaagtcctccaggtcctcctccagctcttcctcatcctggtcccagcgaggcgagtctttgtggtagctgaccgagctgtggcaggagtggtaggagtcccggtcccgctcatcctccatgtcggagccctgcaggctgtgctcgtcagggtcgaagtcctcgctcagctgagagcttccctggctcagctccccggaagaggcatagcggctgctacccgtggggctgtggggatggaacagggttcagggactggggtaccgagtcactgcccacctgagccccagtcacacaggcattgactcatcaccgactgagcacctacgatgtgccaggtcctgctctaggggctggaaaacacagccatgatcagaaaagacaaaaatccccgcttttggccaggtgcggtggctcacgcctgtaatcccagcactttgggaggctgaggtgggcagatcacctgaggtcaggagttcaagaccagcctggccaacatggtgaaaccctgtctctaccaaaaatacaaaaattagctgcgcatggtggcgtatgcctgtaatcccagctactcgggaggctgaggtagaagaatcacttgaacccgggaggtggaggttgcagtgagctgggatcatgccattgcactccagcctgggcaacaagagcgaaattccgtctcaaaaaaaaaaaaaaaaaaaaaaaaattcccacttttgtggcatttgcggtctgtggggaacaggcaattgactgtgctgggaactcagggtcagcgccatcaccacagccccgcagcaggtctcctgtcctccacctggaaaaagtatgggaaatgcatccacttccccgtaccccgggccccaacccaggccagcctctgctgtctctaccagatgctgtctccacagttcctgcttcccttggaagccacagggaattgtaaatccaatcacctccctcccctgctctaaatcctaccatggctccctagtgccttggaataaaatctgtgctagccctgtgtggcccatacgctccaaactccccctgcatacctccctccacttctccccgcctcctccattccggccacgctggccacctcgttgtctctccaacaccataaacctgtgcacttgccgtggtctcttccttgtctgctttatctagcaaactcctacccaccctctggtacccactgaaacatcacttacttgtgcaaatgccccccactgtctggccaggtcaggccctctgttatgtgctgcttatgtgaacccaggatcgtgctcaacgtcaacagcaatatctgtctctgtctaaatacaggcagggggacataggggccaccactcagccctcttctaaccattcacttagtcattcaacgaaccttatcatttcccgattagatacctcctccaatcttagcgcctgagaccctcttccctggccagcctcgaggatgctataggaataaaaaggggttcaagactagcccaggcaatggagcaagacccccatctccacaaaaaataaaaataaattagcttggtgtggcggcctgtgcctgtagtcccagctactggggaggctgaggcaggagaatcgcttgagtctgggtggtggaggttgcagtgagccgaaatggtgccactgcactccagcctgggtgacagagcaagactctgtctaaaaaaaaaagaaaagaaaaaaaaaaagaaaaaaatggttaattcccacaagaaaatgtgaattctgccctcctggatgggtgaattctgcccttctggaactccacctccagctctgtccagccccgtacccctctctccactccaggagacacagcaggacccacatgcatgctgcactccgcagcacctacctgagggcttgtggctcagagaactcctcgtaactgtgcatggagtcactgtaggactcccgggagcccaggggtggtgggcgaacagaatattggtggactgaggcgttgggttgtgacgtagtataatagggcggcgggatgctgttgctcgtttcactgcggtagtcactgtcacgatcatccactgcactgtcggggtcatcgtctggaagagagaggcggtatgggaagagggtgaggaagagagagtgcacatgatgggagccaatacaatttcccagacttacggtgccgctaccgaagaagagaattttttactagtatggataaagaattgtgggtcatgttaatagagatataggcttcagaacaagggaggtgaaaaccctgctttgctttatgtgggtcaaattggacctaaagtctaggggctagggtaggacctacaatgtgaagaaaacagggacagagtagagggcatccttcagctcaaatgtgaagaacaactttgctgaaggtcaggatctctgaaaatgacatgggatttttttccactgagcagttagtttcccataacaggagtcacacagacagtcagggggaagttggaagaagatcaggagttcaaagtggacggaacgctctttaacccttagagatttcctgatatctgagggtgacgaccccagacctgaacttaacaaatatgcaagaaccaagaagatgctgagacatggttctgtctttttcaaaaaggattagattcttagcttggcaaagccaccacacacttggaatctattgctaaaatggaatgtggtagagttgccaaacttcatgtttaataagaactaaaagatattttggtttagtttggtttccttagaaaaaagaacagtttgttttctaaatcctaaaaaaaaaaattccaattctaaaagcaacatgtctgggtggtggcataattggggattgtacattttcttctttattcttttctgtaccttctgaaaaaaaagatttcaataatgcaatctttttaattttttaactaaaaagaatgataaagttatctttattttaaaagtaaagcaaaggccgggcacagtggctcacacctgtaatcccagcactttgggaggcggaggcgggcagattacttgaggccaggagttcaagaccagcctgggcaacataccaagaccctgtctctactaaaaatacaaaaattagccaggtgtggtggcatgtgcctgtaatcccagctccttgggaggctgaggcaggagaatctctggaacccaggaggtggagattgctgtgagccaagatcacacctctgcactccaggggctgggtgacacaagaccctgtctccaaaaaataaaataaaataaaagtaaagtaaaacctagtccatgggccaggcaaagtggctcatgcctgtaatcccagcactttgggaggccaaggcaggaggatcacttgagcccaggagttcaagatcagcctgggcaacatagtaaggccccatctctttaaaaaaatttaaaaattagctgggcgtggtggtgggcgcctgtagtcccagctattcgggagggtatggcaggagcattgctggagcccaggaggtcgaggtagcagtgagctatgattacgcctctgcactgcagtctgggtgtcagaatgagaccctgtatccagaaaaaaagaaaaagtagtccatgaagaaaacatgagaagtacgggtaaggggaagaggatgtaaaaaaatgaaaaaacccccagaccccaaaatctcagagcaatgagtgaaaccttcagacttttgctgtattcatccattcatttagacagggtctctctcacttgggctggagcgcagtggcgcgatcaaaactcactgaaacctcgacctcctgggctcaagagatcctcgcatctcagcctccacagtagctgggaccacaggcacacaccaccacacccagctaattttatttatttattattttgtagagatgggatctccctatattgcccaggctgatcttgaactcctgggctcaagcgatcctcccgcctcagcttcccacagtgctgggattagccgtgagccacctcggccggccagcattctttctatccaattgtccttgaccgggctgagatgtttccagccaaattgcatgaggctgtgcacatgtttacccagtttttttttttcctgacaaattatctgcttatgaagggtaaattactttgagttggattctttttgcttttgcccaggctctgctttctactaagtagctcttgactaaattgcctgcttctggctattttcaaccacttttgttttaacccaacggtctgttttcggttcaattgtctttcctttttgacccaattatctatcagctttagctgcattggtgttttgttttgtttgtttgttggtttttgggttttttttttttttgagacagagtctcgctctgtcacccaggctggagtgcaatggtacgatctcggctcactgcagcctccacctcccaggttcaaatgattctcctgcctcagcctcccgagtagctgggattaaaggcatgcaccaccatgcctggctaatttttgtatttttagtagagatggggtttcgtcacgttggccaggctggtctcgaactcctgacctcaagtgatctgcctacctcggcctcccaaagtgctgggattatggtgtgagctgccacgcctggtctatctttgcttttgaccgtactgttcgtttgtggcaagttggttgttatcgagcttgccctgtctgccaagcattcattttggcaaaattgattttatttatttattttaatctatttattttttagagacagggtctcacactgttgcctaggctaaagtctagtagcacaatcatggctcactgcagtcccaacctcctgggctcaaacaaccctcccacctcagcctcccaaatagctgggactacaggggcgtgccaccacacccggccctttttttttttttttgtagagatggagtcttgctctgttgcccaggctgatttcagactttggagctcaagcgtccctcccgcctcagcctcccaaagtgttggaattacaggtgtgagccagtgtggctggcctaagttgatttttaaccaacttgtttttgataaattgtggtggaccaaagtgtttgtcaacagtttcactggtcctggagttaggtttgtccaccaggatatgaggaaggagtgaaggactccccagttgaaggagagagaaggaggcagatttatcctcaaaatagaggactggccaggcatggtagctcacacctataatcccagcactttgggaggccaaggcgggaggattgcttgaggtcaggagttcaagaccagcctggccaacatggtgaaaccccatctctactaaaaatacaaaaattaaccaggcatagtggcgtgcacctgtaatcccaactactcgggaggctgaggcaagagaactgcttgaacccgggaggtggaggttgcagtgagcagtgatcgcaccactatactccagtctgggtgacagagcaagactccatctcaaaaaaaagaaaaaagaaagaaggaaagaaagaatagaggactggatttctctagaagaggcggggtatgggagaaagggagcaactctttagggcatggatctggtctgtggcctgttaggagctggggcgcacagcaggaggtgggcagcggttgggtgagcgagtgaagtttcatctgtatttacagttgctccccatcactcacattaccgcctgagttccacctcctgtcagatcagcggcagcattagattctcatagaaggccgggcgcagtggctcaaacttgtaatcccagccctttgggaggccaaggcaggtggatcacctgaagtcaggagttcacaaccagcctggccaacatggtgaaaccccatctctactaaaaatacaaaaaattagctgggcatggtggcacgcgcctgtaatcccagctacttgggaggctcaggtacgagaatcacttgaactcggaggcagaggttgcagtgaggcgagattgcgccactgtactccatccagcctgggcaacagagcaagactctgtttcaaaaaaaaaaaaagattctcacgggagcgtgaaccctactgtgaactgtgcatgtgcgggatctaggttgtgtgctccttatgagaatctaatgcctgatgatctgtcactgtcccccatcaccctaagatgggactgtctaattgcaggaaaacaagttcagggctcccactgcttctacatgatgatgagttgtatcattatttcattacatactataatgtaataataataataataaaaataaagtgcacaacaaatgcagtgaacttgaatcatccagaaaccatcccccaaccccagtccataaaaaaattgtcttccatgaaactggtcccttgtgtcaaaaaggttgggaaccgctgttaggtagaaaaacggacatttaattagggccaggtgccatggctcatgcctgtaatcccagcactttgggaggccaaggcaggtggatcacgaggtcaggagatcgagaccctcctggctaacacggtgaaaccccgtctctactaaaaatacaaaaaattagccgggcgtgttggcggacgcctttagtcccagctactcgggaggctgaggcaggagaatggcgtgaaccctggaggcagagcttgcggtgagctgagatcgtgccactgccctccagcctgggtgatagagtgagactccgtctcaaaaaaaaaaaaaaaaaggaaaaggaaaatggacatttaatttagggagggggtggcttgccttattccctgggagagcaaatgaaggtggaaggtgaggtgtgagtgtgggtggacctggggggtgctgaggtccctgtgtgcatctccctgaggtccctggcctgccgttctgttagagaccccgcccacccactaccctctgagtgacactggacacatttccaagtggagaaggaagataggaagaccaaaaggcaggggctacaggagaggaggtgaggttatacggcggagtggggtgcgggggtcacagtgcccagctggagacaagcaggttgttggtctaaatgtccactcctccaggctaaccccccccaccccaccccaatgacggtgcccactccccagcagatggcaggcctcccaagacaggcactaatgaacagggtacaggaaagcttgaaaggggtcttgctgagccctctggcccccacgtgctcgtcacaggctccttgcttccctgtgtggtagtggggaggggccttgggatcaccaaggtgcccaccttcccatgtaactcccagaacatcaatcaggctgagtacttactgtgctgctcaccccagccaaaataattccagttgcctacaaagagaaggggcagaaataataaaagggagcagacagaggggtgggtgtaggaagggggctcccctgctgtcctcactctccccaactgctccccccaccccaaaagtccctcttgtcctgagtaccttccctgagtatcaccttcattgctgacacttgctgtgtctctgctctccaccttgggaggaaggtgggatatccctgtttgtttatttttttcttttctttaattttttttttgaaacacggtctcactctgtcatccagcctggagtagagtggtgcaatcacggcttactgcagcctccaatttccaagctcaagtgatcctcccacctcagcctcctgagtaactgagattacaggcacacaccaccatgttcagctaatgttttggttcttggtggttttctttttgtttttttgtgtggagatggatcttgctatgttggtcaggctggtctcaaacacgtggtctcaagtgaggccgagtagctgggatttacaggcatgagccactgtgcctggctcagttttcaatgagaggaaaggctcagtcaggaagtaacaaagtgggtatttgggcccagggttttctgactatgatgtctagggttagcagtctcccagtctccacccttttcctctcccagctcttggataaggaaagacacactaaattggaaaccctaaggtttgaaacacccctgttgggtggattttatcattctactcattttatgggtgaaactatggggctcagagggatggagtgagcagcccaaagtcacagagcctctgcgcatcagggccagggcgagaaccacctttgcctatcacgtgcagtacctggcacttcagaaaaatgtcctggaccagaatcctggctcctctgaccattggctgctttctctgagaaatagggtgacaaaatactccaagggaggacttgtgggtaaatactgagtggtggtctccacttcccaaaatgaacctgcccctagctctagtccatctgcccaggggctctctgccattgccttcctgcctccactctgcctggccccgcccccattgcaacctctcaatgaccccattcaccaagcgggggtttgtaattccttccaggcagtgatgacccctccctggccagggaagccaaggaactttctcaatatcactccccaagttagtgtggaaacagggtaccccagctggagtatcccaagccctcctcaaccccggttccattaccaccctcctggacacatggtgagggagacacagatacagggagagctgtgagaggggagaaaaggaagatggaaaagcaaatggaaaaggtgccaggcatggtggctcacacctgtaatcccagcactttgggaagctgaggtgggcagatcacatgaggtaaaaaatttgagaccagcctggccaacatggcaaaaccccatctctactaaaaatacaaaaattagctgggcgtggtggcatgtgcctgtaatccccactgctcaagaggctgaggcacaagaatcactcaaatccgggaggcagaggctgcagtgagccaagatagtactattgcagtccagtctgggtgacagagggagactctatctccaagaaaaaaaaaaagagaagaagaaaagaaagtaaatgggaaaggagaaggaggctaaagagtgcagtggggttttggtgtcagcaggtgggagctctgccctgaggctatatgatttgctacttcccctccaccacagagcaatgggaagtcattttaaggagggagacagctcctccatccatgaaaagacctggtctggatgcatctgagtgtccacaaggcccaggaagataaaaaatcttgacaactgcagccttgatggaaataggaagaggaacgtgatcatcatcatcattaacagacaaggtgcagtggaaagggaagcaaagttggagtccctcagacctgggttcaaatcctggctctgccagttgccgggtgtgtggccttgggtaaatcacatctcctcttgggcctcagtttctccatctaagaaaatgggttagtgaaacagccttcgtctgttgtacgtgcgcccattgtacatgtgctggcaggatcttctgcctgtgtctgtctgcaccatctgacgtgggctgctcggggtttgtgctggccccatgaatagtttgtggaatgagttatacgccctcatccaggatctgatgaatggaagtgaagcatctacgaagtgtttttcatgtctctagatgtcccagatccttccaacagccctcagagtgagggggctgtcagatgcgctatttcaaagagagggcccctaaatatcgaagagggacactggcctgcccatgaccacatagcaaggtgggaatcaagcccaagtctcagaactctccttccttccttcctttcttccttcttgtctttcatcaagcccaagtctcagaactcttctctttcctttccttcctttcctttctttccttcccttcctttcttttcttttctcttttcttttctttctttttctttctttctttcctctcctctccttccttcctttctttctttctctctctctctttctctctttctttctctttctttccttccttctttttttgagtcagagtcttgctctgtcacccaggctggagtacagtggcatgatcttggcccactgcagattctgcctcctgggttcaagcaattctcctgcctcagccttctgagtagctgggattacaggcacccaccaccatgcctgttcattttttttgtatttatagtagagatggggttttgccctgttggccaggctggtctcgaactcctgacctcggcttcccaaagtgctgggattacaggggtgagccaccatgcccagcctcagaacgctgatttctaatacactgtaagtggacactgcactctcaggacttgtatctccggactggaggagcctttagacaggacagtcatggggtaggggagggatgaggatttcagctgatacccaaggaagaatcaagaggtacttacagcactggttgctggggacaggcagaggcttgtcttgctcatcttggaacgaatactgaaggggtggaggaaggagaaagggcttctctcagaggggccaaaggccaggggaccaggatagtcctctgttctgtcccatcccgacttccctctacctcccaaattctctccctctctatgagaaggatacagggagtaagagagaaaaggagagaaagacacacacacacacgagagagagagagagagagagagagagagaaagacagagacagagacagagacagaaaaagtaagaaacagagatagaaaaaagactaggggccaggtgcagtgactcacacctgtaatcccagcactttgggaggccgaagcgggcagatcacgaggtcaagagatcgagaccatcctagctaaacggtgaaaccccgtctctactaaaaatacaaaaattagccaggtatggtggcgcatgcctgtagtcccagttacccgggaggccgaggcaggagaatcacttgaacccgggaggtggaggttgcagtgagccaagatcgtgccactgcactccagcctggtgacacagcgagactccgtctcaaaaaagaaaaaaaaaaaaagatgggaacagtagacattggggactccagaagggaggaaggagggagcaggacaagagtgaaaaaactacccgttaggtactgtgtttacaatttgagtaatgccatggaattccagaccttagcatcatgcaatatattcgtgtaacaaacctgcacatgtatccgccaaatgaaaagtaaaattttttattttattattattatcaatattattattttgagacagagccttgctctgttgcccaggctggagtgcagcagcgtgatctcggctcactgcaacttctgcctcccagattcaagtgattctcccacctcagcctcccaaggagctggaatgacaggcgcccgccaccatgcctagctaattttttgtacttttagtagagacggggtttcaccgtgttggccaggctggtctcgaactcctggcctcaaataatctgcccgccacagcctcccaaattgctgggattacaggtgtgagccactaagcctggctaattttttttttttttttttttttttagtagagacggggtttcactgtgttgaccaggctggtcttgaactcctgacctcaggtgatctgcccaccttcgcctctcaaagtgctgggattacaggcgtgagccactgcgcctggcctctgtgtgtttcttgaccccatcattgtctagagactggaccacatgggtcatggatgcagtcaggttacaaagagttagaaacagagatgcagggaaagacaagcttagagagaaacagcatctgtaagtgaaaatcatggggagacagagacagaaacaaggaagaaacagtcccctcccaccccaacactcacttcatcctggtcccgcatagcattgagctgctccagcttcttggcccagtagcgagcctcctcttcaggaatgtctgcaagcagagccctgtctgtgagcctggaagaccctccctgccgctcagcctccatcctccaggcctactgagctccacccgggccctggcttctggggtctttggcaaagcctcagaagtaggggtgggttggtctgcggtctcaggagggtggatggagatgaaggggaggtaccgtggtgcctctgacgcccctcttcccagagctgaatggagaatagttggaggatgacaggagatggttcctagcctttacgagggtggggaagccattgtttttatttaattttttaatttttaaattgttttttgagacggagtctcactctgttgcccaggctggagtgaagtggtacaatctcagttcactgcaacctccacctcctgggttcaagcgattctcctgcctcagcctcccgagtagctgggattacaggtgtgcaccaccatgcccagttaatttttttgtattttgagtagagacagggtttctccatgttggccaggctgctctcaaactcctgacatcaggtgatccatctgcctcggcctctcaaagtgctgggattataggcatgagccaccacgcccagcccattgtttttatttttatttttttagagacagggtctcgctctgtcacccaggctggagtgcagtggcacaatcacaactcactgaagcctcaaactcctgggcttgagccatcctcttgcctcagcctcccaaatagttgggactacagaaacccagcaccatgcctggtgaatttttaactttttcatagagatgggatctcactagatggcccaggctggtctcaaactcctggcctcaaatgatcctccccccttggcctcccaaagtgctgggattacagacatgagaagctatgcctggccagccatgggttcttagaagaatgaggtggagagactcaaggtgcttccaggaaaggaagaggggactatctgttctcagcctctgtctacatgtctctctctgtctctctttgtctctctgtctctgtctgtctctcctcctatccccagttcactgttgcagtctcaggcatcaccaaggaacagccaggatagctcaaccctgaacgccctcggtcgtgaagcacttgcagctcactgggaagctacggggcccaggtcatggcccgcacccagcaggttcacatccctgttctctgcaacccaagaaactctctctcctccggggcgaaggaccctcattctcagcctgaagggtcagctagacctacccaggcctgttcactctcctggaatagctgagtgagtccacaactggggctggggctgggtgaaggtcccgggcccctgtactcacctaagggtagctcaaagcgcgtgtccaggaggatgcggtggaaggtggggtccttggtgccacagatctcactgtctgccatgatgacctgggagtccagcgtcagccactctccagggccctcctgggggttgggggaggaggtgtgtgggtcaggaatctgctggtcactagtccccagggcccctactctcgcatgagacatccccctcacccctaccccaaaaccaaagtcatgtcccctctctatctttccttccgtccttccttccttcccttccttccttccctccctccctccctgcttccttcctttctttctttcccttcctcccttccttcctttattcctttcttttccttccttcctttctctctcttttttcttttcttttcttttttttttttttttgagacagagtctcgctctgtcgcccaggctggagtgcagtggcgcgatctcggctcactgcaagctctgcctcctgggttcacgccattctcctgcctcagcttcccgagtagctgggactacaggcacccgccaccacgcctggctgattttttgtatatttagtagagacggggtttcaccgtgttagccaggatggtctcaatctcctgacctcgtgatccacccatctcggcctcccaaagtgctgggattacaggcatgagccaccatgcccggcctaatttaatttttttgagacagagtctctctatcacccaggctggagtgcagtggcgtgatctcagctcactgcaacctccgcttcccaggctcaagtgattctcctaactcagcctcctgagctgctgggattacaggtacgtgccagcactcctggctaattttttgtatttttgagtagagacggggtttcaccatgttgcccaggctggtctgctgagctcaggcaatccacctgcctcagcctcccaaagtgctgggattacaggtgtgagccaccatgcccagccaaggcttccttttagactcgcttacctagattgttgcaaccatttcgtccctctgcattcattcattcaaaaacaaacactcactggccaggtgcggtgactcacacctgtaatcccagcactttgcgaggccaaggtgggcggatcacttgaggtcaggagttcaagaccagcctggccaacatggcgaaaccccatctctactaaaaatgcaaaaattagttgggtgtggtggcaggcccctgtaatcccagctactcaggaggttgaggcaggagaatcacttaagccagggaggcagaggttgcagtgagccaagattgtgccattgcactccagcctgggtgacagagtgagactccatctcacagtaaaataaaataaaataaaataaaataaaataaaataaaataaaataaaataaaatgacaaaaacgaacaaacaaaaaacagtccccagtccctcctctatgcctggttcatattgggtgatgccagggtccccaagaggcccagccatcatcaccctggctcctgagagcccatagcccttggaaacagggctggacacaggcacccccagccccatgaggtcatagcccagagggaggaaggagggctaaaggatctagagagaagtcagagagggcttcctggaggtgggcacatgggaatttagaaggtgatggaaaggaggacacttgaagctcagggaacacactatgcaaaggttcagagggtggaatctgggaggggtagaggttagagtgtggggggagatgaggctagtgggcaggtgccatctgaagggcctcccaaggcagatggacaggggaggacagatcagagctccagctaataaggccttcctggggtcagcatggagaggttgagacttgaggttaggaggccagggattgggctgtggggacagatgaatagacatgaccacggcctggcatggtggctcgcacctgtaataccagcactttgggaggctgaggtgggtggattgcttgagcccaggagttcgaaaccagcctgggcaacatggcaaaaccctgtctctattaaaaatacaaaaaaaataaggggggcctggtggcatgcacctgcagtcccagctactcaggaggctgaggtgggaggatcacttgagcctgggaagtcgaggctgcagtgggccatgatcatgccaatgcactccagcctgggcaacagagtgagaccctgtctcaaaaataaataattaaataaaaaatagacatcactactacctgctgacaatgatgcacaggctgaggggccagggttgttacctagcaccttcttatgagttggtgtaagcttcctgctgctgcccatctgggacacaaaatgctaattgcctatattatcccttttctccttccaaggtaatacatttttagctgtgcctagggaagcacagcccaggactacattttccagcctaggactacatttcccagaatcccttgcagcaaggtgttggccacatgtctaagttctggccaatgagatgtgcatgaaccacccccctcccccaccaccagcacctttcggtggttggaatgaagatgcaatggtgagcctaaagcagccatttggggccacaaggtggaagccacatggagagagaggcagagcaagatggaaggtgtataggctctagtgactttggaaggttcgtggcaatcccaagtgtctacattgatgttgtcaggggataggagataaatgcccatcttgtttagtccactggtctctgggcttctgcaaggcactcctccttcttcaccctcaggccacccgccactcacctcattggactggcggatggtcctcagtgggatccacacagtgcccaccattgtgtcccagatgagacccttattccacacctccaccgtcagtcccaaatccagacggttaatctcgctgcagaaaaaggagagggggcgtcgagggagcaggagggaggaaacgggggcccagggagtttagttgattcgcctgagaacacacagcatactgcaattcaaacctaggcctgggagtgtcctaggtggtagggtaacatggtggttctcattttatagaggggaaactgaggccagtgggggaagttaagagctcggggtatcacaaaagaaccaggattcaaagccgggaaggatggcgtggggacagatgttacacatcgcctgcaccttcatctttctgagcccttccttgggccctccaacactgaccatgctgggtaagtgaggaagaggctcaaataccctccatagctccctttacctacaggataaggacattcgggtcacctctgtccttcccagtgtcatccccatctaatgatgtgaggacacgatcccacctcaaagcactttccctgcaggcctcgccctagacatatgtgaattcgggggagcaggaaacttggtgaaatgtgagattcactgaatttacagtttaccaaagatttatcttaagaaatatatttttaaaatatggccaaccacggtggctcacgcctgtaatcccagcactttgggaggccgagatgggcggatcacctgaggttgggaatttaagaccagcctgaccaacatggagaaaccccatctccactaaaaatacaaaattagccgggcgtggtggtgcatgtctgtaattccagctactcgggaggctgaggcaggagaattgcttgaacccaggaggcggaggttgcggtgagccgagatcacgccattgcactccagcctgggcaacaaaagcaaaactcagtctcaaaaaaaaaaaaaaaagtatatatatatctgatatatatatctgttggctgggattggtggctcctggctcatgcctataatcccagcactttgggaggccgaggcgggtggatcacctgaggttaaaagttcaagaccagcctggccaacatggtgaaacccggtctttactaaatacacaaaaattagccgggcatggtggcacgcacatgtagtcccagctactcgggaggctaaggcaggagaatagcttgaacccaggaggcagaggttgcagtgagccgagattgcaccactacactccagcctgggccacagagtgaggctctgtctcaaaacaaaacaaaaaaaaaaggaaaaaaattccattggccaggcatggtggctcacatctataatcccagcaccttgggaggctgaggtgggcggatcacctgagtccaggagtttgagactagcctggccaccatagtgaaacaccatctctacttaaaacacaaaaattagccgggtgtggtggcacacgcttgtaatcccagctagttgggaggctgaggcaggaggatcacttgaacctgggaggtggaggttgaagtgagccgagattatgccactgtactccagcctgggcaacagagtgaggctctgcctcaaaacaaacaaacaaacaaacaaaattggtggcaaggcctgggaaggcatgatgccctgaaattgtagcttggaggtagtggtcagggagggcttcactgaggaggtgacacaagctgagacctgaaggagaagagccagctggggacaggagagcaagtgcaagggccctggggcaagaacaagctgggaagtgttggagaaaggggcagaggtgggtgtggctggggcaggtgagggagatagagcgagaacctggtgggaatcacggggaaggctgtgggttttattgtgaggtcgatgagccacggacaagtttggaacatgggagcgacaggatgtgatttgcagttttaaaaatatccccctggctgcctggaggagaacagattgtaggaggtggatggcacaggaggccagggcggaggctggcgggcagcagggacttggctggtggctgcggagaccaagggaagtgattggattggggatgtgttttggaggtgaaggtgataaggtggacaggggaagagggaggacagaggggagtcacccgggattccccagtgtccagctctgccctgaggggccagcgaggtgctgggctatgccagggagtgaggtcatgccagacgctgcagactcacaacatgaaatcctgctcccagctgggctggctgccccgcaccgcgatggtcgtgctcttgacattctgcactttcagggtcacgtacgtgttgaatttctctgtggcagtgagagtaggggtcagcgctggggctcagggactctccaatgccccttcccaagctctagaccatctgctgtgatcccctcaggaatttctgggccactcaccccctaacccacaaccccaccctcagggcacaagggaggggcctcagtgtggggagacgtggaattttgggatacttcatccagctgcttcgaaatgaccatgccattggttttcagctaaaaagactgaggtcccagaaaaggggaacaaaattgactgtaagaaaccccctttgcaggctgggtgcagtggctcgcgcctataatgccagcactttgggaggtcaaggggggaggattgcttgagcccagcagttcaagaccagcctgggcaacttggcaaaaccctatctctactaaaaaatacaaaaaaataattagctgggtgcagtggtgcacgcctgtggtcccagctacttggaaggctgaggtgggaggattgcttgagcctgggaggttgaggctgtagtaaaacatgattgcaccacggcactccagcctcaaaaaataaaaattttaaataaaaataataataataaaaaggcagggcacggtagctcacgcctgcaatcctagcactttgggaggccgaggcgggcggatcatttaaggtcagaagtttgagaccagcctggccaacatggcgaaaccccatctctactaaaaataaaaaaattagccgggcgtggtagagggcgcctgtaatcccagctacttgggaggctgaggcaggagaattgcttgaacccagaggcagaggttgcagtgagccgagatcacgccactgcactccagcctgggcaacagaaggagactctgtctcaaaaaaaaaaaaaaaagaagaagaagaaaagaaagaaactcctttcgcctctctgagcctcatttttcccacctgtagccccatctaagagtccccattctacctcttaggaccctgggaagagccactggctcagggcaagccccaccccttacagactctccaaggatggctggggagacccggggacccccatacaaactgcagggaccccaggccaatggctgcccctccccctatttaatcttctgacccctctcctgatgctcagaagacataaagcccaactctaagtctgggctgggaccccctcccagtctctccaagagacagacagacagacagacaacacgggacaggacagcaagagaagccacttaccttgggcaccatcaaacttggcttttttgactgtggagagagacagagatagggaagggaggtggggagagatgtggggaggaggaggcagagatacggagagattcagagacacaccaagatggagacataaggagagagacacagaggagagacaggcaaagataaaaagcaaaagagacagatgttaaaaaagaaagatagaagcaatgtcagagacagagacaaggggaggaggagaggtaggaaagaggaggcagggatgagagggagagagagaagccatcagacagatgagcacaggcaaccctagaatggaaggaaatttggaccctgagagcattccctgcccctccctctccctgcatcccctgtccccatcaaactccccaagctcccaactagctgtgcctttacccacaattgaacaagattagaaagaaagagctgggcagatggtgggagaggcctcctacaagaagccctccaggattgccccagaagaagaggggaagttgaggaggtggagaagaagaaggcgaggataaagacaatctctgatgactccaccagccccgacaggtcagcaagacctctcccttgattgtccagctcagtctgcaatgtcaaatgctcccagggtttggggaagcctcaaagaaggctgggtgagttgggacaaagcaacccagagagctggctctcaaaatgcatgtggagggcgaggcacggtggctcacacctataaccccagcactttaggtggctgaagcaggtggatcacctgaggtcaggagttcaagaccagcctggccaacatggtgaatccttgtctctactaaaaatacaaaaatttgccaggtgtggtggcaggcgcctatagtctcagctacttgggaggctgaggtaggagaatcacttgaacccaggaggcagagattgcagtgagccaagatcatgccactgcactccagcctgggcagcagagtgagattcttgtctcaacaacaaccaaaagtaatgtacagggagacacttgggtcctggctggagggttgacagagattgtccagccccacctgcttgtgggaggtgtaacctgaatatatgtcaggcaccccactgaggtccagtcttctcacatttcacataatctcacagccccaagagattcaaagccatgtcgccccctcctggctcttctcaacaggtattcagtttccattgccaacacctctcacaccttgcttttgtcccccacatctttttcctccattaattctctactcccacccccaatcttctcccacactgagctcttccctccctttcctttctttcttttctttttttttttctttttttttttagggacggagtcttgctctattgcccaggctggagtgcagtggtgccatctcagctcaccgcaacttctacctcccagattcaagcaattctcctgcctcagcttcccaagtagctgggactacaggcgtgcgccaccatgcccagctaatttttgtattttttagtagagacagggtttcagtatatgtcggccaggctggtctcaaactcctgatctcaggtgatccatccgccttggcctcccaaggtgctgggatgacaggtgtgagctgccacaccggccccttttctttcctccctcttttcttctccccttttccttttcaaattagtgtctttgtttgtgtaggcaatgcatgcacatgttgtaaaatccaaaacaaccaaaagatgaggcactgagaataaagctctttccatcccagcccttcatctccctcccaaatgcaatcaacgttggcagttccttgttccactggagatggtccatgcgtcggcaaccatacccacgttcgttttgcttgatttccaagacaaatggtagcattcgacacccactgttctaatccttcatgttttttcagtatgtcttgaagagcgtgtactagcgagttgaaggataaattcctagaaacagaattgtgtttctatgggcagatgtcacagcctcccatcccgggtttgtatctctgtcctcatcgcttgaatttctgtctcacaaaaggcacctgagtggagccagtgaagagagaattcccgtgaagagcgggggaagtgcgatggccctaaacacatgtcagtaaagactgttcctggccaggcgcggtggctcatgcctgtaatcccagcactttgggaggccgaggcaggtggatcacttgacgtcaggagttcgagaccagcctgaacaacatggggaaacctcgtctctcctaaaataacaaaaattagccgggtgtggtggcacgcacctctaatcccagctactcgggaggctgaggcaggagaatccctttaacctggaaggcagaggttgcagtgagctgagattgtgccactgcactgcagcccttgggtgggccttgagagaagtgaatgctggtttgagccaggttcagattcctgagctgtgtgaccctgggcaagtgaacccctctctctgggccttcatctctgcttccatctctgtcttttttttttctaggtctggtttgttcgctcacatcctcagccccacccagcccccagggagcgcacccacccagcacctcacccctgggactgaaagaggctcaggaacactcaggaatgtgcccagcaggagctttgggcctggctcctggaggaggtccagcctgcaggcgtggggactctctgtgaagggggtgggcaggggaaggggcaagaggtagaatgtgacgggatcgggggtggaggggatgctgacagaggctgagaaaggcacccacagctggagggactcatacagggagaggaagggagaggagagaggaagaaatgatgggcatgaaagcaagagaggagagtctggacagatggagagaaatagagagacacaaggagacagcgagagtaccaggcatagaggcacatgcctgtaatcccagctactaggaaggctaaggcaggaggatcccttgagcccaggagttcaagaccagcctgggcaatgtagtaagatcccatgtctaaaaataataatttaaaagggagagaggctgggcgtggtagcccacatctgtaatcccagcactttgaggccgaggcaggtggatcacatgaggtcaggagttcgagaccagcctgggcaacatggtaaaaccccatctctattaaaaatacaaaaattagccgggcatgatggtgcacgcctgtagtcccagctactcgggaggctgaggcaggagaatcgcttgaacccaggaggcggaggttgcagtgagccaagatcacgccattgcactccagcctgggcgacagagcaagactctgtctcaaaaaatatataataataataataataataaaagagagagggggaaagatttccactagggagggcaggcaggtggaggagacactggggagaggagaggcagttgggggagaaaagtagggatgcatatgggggtgggaaagtgacaggctctggggggtgatacaaggggctcactggggtctagactgggctgggctcacttgaagctcctccaactgtgccctgttttataaaccatggatttaggctcagcggggagcccagtagctccttgatctgttctctctctctctttcccaatccctgtctctcatctccctcctccccgttctatttctctccactctggtcgtcttcttttggtctctgttctctccttctctctctcactgtctctgcccttcttgtgcccctcccttggtcagtccggctcctcttccctaagcctcagctccttcctgcagcctctcttggctagaggggaatggtctccgttggggtcctcaggcagtgggggaccggctggagggctgtaccctctgatagctgaagccaggctcctgcacttagctccctgccgaggtccaggttgaggacatccatgatttttcatcactggggctcccagtgggagaggggtctcagagggaaaaggggacaggaaagggggccgagagtggcgagggggttctcaggagggaagggtgttcgcggtgagggaggggattcgggaagggggatgggcgcagaggggagggtggtatcgggggagaggcttggaggaggaagggggctcagagaaggaacccagtctctctccctgtcttccccggtcagtaaatggtccctgagtcaccgtcttcgtcgtcacatcccgccacctccccgcctgcgccgggttgctgtatcagggtcagcggggcggaagcgccacccttccccagcgggcttcgggtcacacgcatgaggctatttatagcgtgggcgcgcggagggcgtgggaggcgcgccggcggacaggggggcggggatgaggggggtgcccactgctgtccccagcgacgagcgggtgaagacaccgcgtcatgcggcctcaaaggtctttggggcccccagaagcgctgactgatgaatgtagtggccgtacccggggaggctgaggcaggagttcaggctgcgggacacccctgcagcctggcttcgcgcctccgtttctgcatctggaaaatggggagacggagtggctgatctcccttccctctcctttctcctcctcttcttccctcctcttcctccctcaccccttctgcagaatgattatagtgtcatttatactattattattattactgatatctttactgtttttattatttggttgtgttctaaaggtgtccctggcctggattctaggatttgaataccctggattcttttctttttctttcttttctcttcttcttcttctttttttttcttttcttttctttttttttttttttttttttttgacagggtctctctctgttgcccaggctccaggctggagggcagtggtgtgatcatggctcactgcagcctcgatctcccaggttcaagcgatcctccccactcagcctctcgagtagctgagactgcaggtgcgcatcaccatgcttggctattcctttttttttttttttttttttgtagagatggggtcttgctatgttgctatggctggcttcaaggctcaagccatcccctcggcctcccaaagtgttggaattacaggcgtgaaccacatggctgactgaccctggattctaattaggggggactgcagtcttggggcactggctccctgacctgccacgtgggatggggtggggagacaggaggtggagatccagccgtctagggcttctgaaagcccacccgccccaggattagcttgggggaagggaggaagcatagagaatccagaaatagattataggagatttgatcgttttgtgtgtgatgttggtggagggcatttcagcgggagatggatgggctttaggataaaagacctcagctgtgctggtttcgcatctgggagacactaaatgaggacccttatcctccgttgacacaaatagaccagagccagactgagccttcagtgtaaaaaacaccaagaacctggagttccagagagcttcgggaataagggatttgtgtgtgtgttgtttaccatgaaccacttagaagtaggcctagcctatagtaggtgctcattaaatagtaattcacggaaggaatgacgtcacctcctccattaatcctgggaggctgagctaagagctgtcccccagaggcgcgggcaggcgctgtccacggtgctgaatgctcggtcccacccgtgtaccctcaacgaactaggctccctcctggagtggccctgggggacccctcttggagcgctcctcgggccccagaatgcagtggactctcagaaatgtcctgcactcagaaccgccttccagaaagcttttagtctccattaataaaaacatcatcattgatttttttttttttttttttttgacggagtctcactctgtagcccaagctggagtgcagtggcgcgacctcggctcactgcaacctccgccttcggggcttaagcgattctcgtgcctcagccccctgagtagctgggactacaggcgcgcgccaccatacccagctaatttttttgtattttagtaaagacagggtttcaccatgttgcccagggtggtcttgaactcctgagctcaggagatctgcccgcctaggcctcccaaagtgctgggattacaggcgtgagccaccggggccggcccatcattgatttttcatgtcttttgctcacgattattgggccttcccgtaggccaggagtcatgccaggggctctgcaagcctcattagagagttctggcaaacgtagatggtggatgctactcctgtgcccattccacagatgagcacaccaaggaatgcagaggatgtgagacttgccaggaagtggtggacttagcaattcacactcaggcctgctggacccaggatgcccttattggcaccttgcagaagaggtccattgtatgtggaagaaaagtgaggccaggttagggaaagggttaggctgcagccctgaagatgcaactctggagggcatcccatgagaacggtaggagctaagacctagatgcagctcctcctagctggagggtatcagggactgagtagccaggaacggagggatgtgtgaaggcttcttaggcaaggagcaggggaatagccccgatgaatggagagattgtgacatgtctgtttactagatgcatgagagaagaaagcaatcctggctgggcacagtggctcatgcctgtaatcccagcactttgggaggccaaagcaggtagatcacttggtggtcaggagttcgaggccagcctggctagcatggtgaaaccccatctccactaaaaatacaaaaaattagctgggcatgatggtgtgcatctgtaatctcagctactcaggaggctgaggcaggagaattgcttgaacccgggaggaggaggttacagtgaactgaaattgtgccactgcactccagcttgggcaacagagccagactctgtctccaataaataaataaatagaaagaagaaggcaatcccagggcagaacatcactccacagaagggacttggctgtctccgaggtcctggggtctgagagaaggctcaaacttctgccaaccccagtaggctctagagtcagtcagctccacctctggctctgttccaccaggcaagttgttaaagctccctgagcctcagttttcctcatctgtacaatggggctactgtaagagttaaagagggcatgggcataaaaatccttaacatcatgcctatgaaatgctgggctgggcacggtggctcgagcctgtaatctcagtacattgggaggccgaggcaagaggatcacttgaagtcaggagttcaagaccagcctggccactagagatgtatttgtatttttagtagagatgagaaaccccatctctactaaaaatacaaaaactagctaggtgtggtagcacgtgcctgtaatcccagctactcgggaggctgaggcaggaaaatcgcttgaacttggaaggtggaggtttcagtgaaccgagatcacaccactacactgcagtccgggtgacagagtgagaccgtgtctcaaaaaacaaacaaacaaacaaaaaagctggataaatggggtttgttgttgatattattgtaagttgtgaagcaaacccaccctcacctaaattcactgatttgttcatgtcatttattcataacatgtttatagagcctttaaaacatcagttgggcgtggtggctcacacctgtaatcctagcactttgggaggctgaggagggtgaatcacttgagcccaggagttcaagaccagcctgggcagcagggcaaaaccctgcttctgcaaaaaattaaaaagaaaaaagtcagccgggtgtggtggtgcatgcctatactcccagctacttgggaggctgaggcaggaggatcacttgagccctggaggtcaaggctgcagcaagctgagatcatgccactgcactgcagcctgagtaacaggctttgagtgagactctgtctcaaaacaaaacaaaacatcaagtggcctgtgcaaaatgctgtgaggcacataggaagatctggaagtaacccttcacaccaccatgcttttgctcatgctgttccctccacccagagcaccatctccctcctgctcatctccccctcatcacatcttctgagactcaagtaaatggtggtggtggaatcagggtaggcttcccagaggaagagagccctggataccccactcctcagctcccttagccctccctcatctctttcattctaaccccatgggacgtgcaggagtgatggctaggaatagggctgggtcccagagccaggaacagtgcctggtatacagtaggtgctcaattaatgcttgttgcataaataaaataagtgacttcatgaaggaaccaggtggcatttaccattcacagcctcaggatcctgccaagacctagtcagtggattacgatgttgggaagcagcggggcaccacatgaataaataaatgaagcgggcagagataaggcccatacaccatacagggtggtctgctatgtgttggtgctgggtgtatacacaagagcttgcatttgcctgtacttgcttgggtatttgcagcagtagttggctcatcttaccagggcaggcaggtgcctgcctctacatggatatgagtgtgcatgtgtgcagagtatgtgcaccatttaagtgcaggtgggagtctgcacatgtgtgtctaggagtggggtgtcactacatcagagacacactggtgtgtgtgagcttgtgggtgatatgttaggtggaaaacacacatattgatgtttgcatgtgtacatggatgcagttctgtggcagctgtatttgtttatctgcatacatgtatgcacttgtgtgcaatgaaatactcaaatgtgtatttacttgtatgcatcatcatccacttgttgaaaggggctgctttgaatgtccaggcaagtgttgtcatgtgcatacacacatggctttgacatgtgcttatatgaatatatatgtgcttcatggggttggggaccttaacagatatgtatgggtacatgtctgagtgttaggacatgagtgaatctttttttttgagacagagtctcactgtgttgcccaggctggagtacagtggcaggatctcagctcactgcaacctccacctcccctattcaagtgattctccttcctcagcctcccgagtagctgagactacaggtgcgcgccaccacacctggctaattttttttattttttagcagtgacaaagtttcaccatgttggccaggctggtcttgaactcctgacctcaagtgatctgcccaccttggcctcccaaagtcaaagtgatgagattacaggcctgagccaccgcgctcggctggacatgggtggatctttatgtgacatgtatattgtgagcattcatcagacacgtggatacatctatatgcgtgctggcagacacacacactcacacgtgtgttgctgggactatatctgtagcggcagactgtgtcctatatacacgtgtatgcttgtgttcacacaggcatttgagtacacacgtgtgcctacggaatgtgccttcccaggcacatggtctgcgtagagccttcatacatcctaagcatttgtgtccacacaggaacaagtctgggtatgaatgtgtgtagggattggcaaacgcctgtgggtccccggtggaggggaggggggacaggtatttcctcagctgagctcaggcaacacggcaacccatctcagcctagcttcactcctgccaagcccaccccaacatctctcgtgctcagccatcccagcccctcccctctctgggcaccatcccacctctccctgggagactggcctcacccagcacttctccctctccccacccctccctgcctcctactcctcctcactccaacctcacacctccctttacacctgagggccttacctcccacccctgtcaacctcttccccagccttgcccctcccagcgattcctctccactcagccgggcccctccctgtaaagtccacagaatccagcacagtcctcccccaacgtctctgtttctggaagcctcatccctcttgcctcctgctgcccccccttaatgccacccccgcagccgagcctcctgtttgcgtcagagttaagggtgagatccccgcccccccccccccccccccactccactaggcaaaccttccagagaagcccaacttggaggatgtgaggcggggtggggcgggatgctggggggagaagagagaggatagaggagtcagccaagaacacccacgtcggaacctcctccagtgccacctttaagagcccggctacttagagcagggggagaggtcagtagggggtctggacattcaagttctcctcccattccgtcctcaggcctaggcggtgggggtcgcctaggggtctccttcacttccctactcccctaactccataggcctggaggctaggggatggaggagttgacctttgactctagggacccttcttccaccacccccagccccgtccagcagaaacgagcttagagaaagtaggcccctgtccctttaagaacacccgcgtccacgccggcccagcccggccggatttgcactcggaagctgccgcggcggggagcgggcgggcggggcagggtttgtgaatgaatcggccgagggggaggggagggaggaggaggggcggcgggggcggttcccggctccccggcctgcccaccctgtgtccaggcagcaggagttcagcacacgcacgcttcctgtcgcccgaggtctcccgaagcctgcagtctcaggcttggcagacacaccccttcccccaccccagccttcttgaaatgggtgggagtgacggggggaccccagtccttaagaaccaggggttcagagctctgtaggcgtggaacggcggtccacatccacccctgccgcccaaggtctcccagagtttgatttctcaaacgggagtgcccagaacgcctgggttcggttgggctggcttccccacgaccccagagccataaaggtgtggggtggggggtcatgcccctcccacgtctccctccctcctccaaccccaacgcagagcgtgggcctgggcgtgggcctctgtgcagatggcgttctggccccaaaatagctccccccccacctcacgtctccctccctccctctctccagtgcaaagtgggtgaggtgaggatgggccaggagggggaccaggagacattgctcttccaagaagtaggctccctgccgagaaggccctgaaacgtgtttgggagaaccggagggggcagggagcgggaagaccttctggacattcctccaaccccctcactcgggaggccaaagagttaactggaaaagcgcccccagacctccagtcacagccctctctggacgctgggaggggtctcctgtctccacactccccccactccagtcctctttacacctagggctgggagagtcctagaactcgtggatgccctgatggccaagcccctctacctatatcttacatccccacggcttggagaaccctcccaccgcactctccttcgaatttccagccgggtccgcgtccatgaggacccgtaacccagcccacaacaccagaccccttccaagcacccctgcaggcttcaatcaaactaccgagcccagactcttcctcactgaccctctaaaaacctggtctacacagacgccccagtctagatcgtttccgggtagaaccccggatacccgtccacgtccacacgggcctccgcgttcagccgcgtccacacgacccctccagcagcggccaccaggacccccgagagccctgccgcgtctacacggatcaccccctccggggcccagctgcgtcgacaagggctacccctctcaaaagtccagccacctggactcgggtcaccccccaggaaccccctgggagccgcatccacgcggaccccgaccccagcccgcgtccacacgggtcccccgacccccagcctcgcctcctacctccaacgcaaagcagagacatgtctccgagctcgcaggtgggccggaggcggccgggccggctctgtcgggtcgggctcagcggccgctgggctggggcatctcccggctgcagcccgcgcttggctcacgccggggcccggccgccaccggccatcttggttcagcaccgggggcgcggacagcgcctgacgtggcgctgatgcggggcgggcaggcggagcccagggacgcctgatggggcgggggcgctgcgggctgggggggcgttaaagggcctggctccgggaaggggcgcctcgccccacacctcctcgttgcagggggacaaggggcgacggcggcccccaagcaggtttcctcctgtgcagaccctcacctgcactgaaatggtgcacgtgcccccgccacccatgcatggacattcctgccctggtaacctgggcaaacgcctccctgcaatactcaagcaagtacaggcaaatgcaagctcttgtgtgtacgcccggcaccagcaccgggcagatggtcctgttctctgagtatctctcttcctctgtctctacgtctctgtctctctaactctactgcctggtctctttctctccctgggtctctgttcctctgactctgtccactgctctctcagtcatgtgtctcttagcctctctctgtaaagtctttttgcagctctactgcatcctgtctaggtctctctctatgtctctaagccatccagcccatgggtccttgcccacactctgaactccttttcatccatcaatgtcttgtctgaatatcctctcctccaggaaggcttccctgactgccccaagctgagcctttgtttctcctctctggactcccccagcccctatcccttcctctgattgggccctgacccgaacgaaactctgccactcctccccacttttcttttttttagatggagtctccctctgcagcccaggctggaatgcagtgacgcaatcttggctcactgcaacctctgcctcctgggatcaagagattctcctgcctcagcctccccgagtagctgggactacaggcgcatgccaccatgcccagctttttttttttattttattttttttatttttagtagagacgaggtttcaccatgttggccagcctggtcttgaacacttgacctcaggggatccgcccatctcggcctcccaaagtgctgggattcagacctgagccactgcgcctggccccctccccacatatcaaactgggcagctccatgtgggccccttgccctgcaacctgctcgctgtatcactggcacctaaactagcatgaaaggctgagccccacagggtctcctgcccccagcccacatgaaagagcttcataaatgcagaatgtgcatggagttgagtgaggccattgttcaaaaccaaactctgtctctcatcacaagcatggccttgggcaggtcttgtgacctcctcgtgcctcagtttccgcacctgtagaatgaatatgataacaagtcctgcctcacaaggttgctggaggtattacatgagttaacatgtgaaaccagttgtaatttttttttttttggaggtgtagtctcaatctgtggcccaggctggagtgcagtggcaccatctcagttcactgcaacctcaacctccaagtgatcttcctgcctcagcctcctgagtagctgggattacaggcgctcgccaccacatccagctaatttttttgtattttttgtagagatggggtttcaccatgttggccaggctggtctcaaactcctgacctcaagtgatccacccaccgtggcctcccaaaatgctgggattacacgaatgagccaccgcgcctggccccagttgtaatcttaatgcctaatagtaaccatgtttgtatctgtcactgctttaaatttttaaaaaaatcagcacagctaatttttgtattttttgtagagacagagtttcaccatgtcgcacaggctgtctcaaactcctgggctcaagtgatcctcccgtctcagcctcccaaaatgttgggattacaggctcatgagccaccatgcctggtcttaaatttttattaaacatcaatgagtagatgttttattaaacattgataatcaataaaacattgatgttttattaaacatcaatgagtagataaactatgaggagcaggcttggataaaaaaaattaccatcgaccgggctcggtggctcacgcctataataccagcactttgggaggctgaggcggggtgatcacaaggtcaggagatcgagaccatcctggctaacacggtaaaacccgtctctactaaaaatacaaaaaattagccgggcgtggtggcgggcgcctgtattcccagctactcaggaggctgaggcaggagaaaggcgtgaatccgggaggcggagcttgcagtgagccgagatcgggccactgtactccagcctgggtgacagagagagactccgtctcaaaaaaaaaaaaaaataccatcacaataaaagacccccatgtgcctctccccaatctcataatccttccctgcagatggaagaactatcacaaattttgtttttcattttcttccttttccttatagtttaccacatgctccttagcaaacaatacatggttacctcttgcatgtttctatttttttgagacaaggtctcattgtgtcacccaggctgtagtacagtggtgtgagctcctgagctcagacaatcctcctgtctcagcctcccaagtacctggaacaacaggcatgcacctccatgcctggctaattagagatgagggtctcactatgttgcccaggcttgtcttgaactctggggttcaaacaatctgcctgccttggactcccaaagtgctgaaattacaggcatgagccacctcatttgactttgttcacattctttactaatctgtttgtttgtttgttttttgaaacagagctgcactctgtcacccaggctggagtgcagtggcacaatctccgctcactgcaatctctgcctcccaggttcaagcgattctcctacctcagcctcccgagtagctgggattacaggcgcccatcaccttgcctggctttttttttttttttttttttttttttttttttgagacagagttttgctcttgttgcccaagctggagtgcaatggcacgatctcagctcaccgcaacctccgcctcccaggttcaagcaattctcctgcctcagcctcctgagtagctgggattacaggcatgtgccaccatgcccagctaatttttttgtaatttttagtagagacggggtttctccatgttggtcaggctggtctcgaactcctgacctcaggtgatctgcccatctcggcctcccaaaatgctgggattacaggcatgagccactatgcctggccatggaggttgcagtgataatttttgtatttttagtagagacagggtttcaccatgttggccaggctggtctcaaactcctgacctcaggtgatccacccacctcagcctcccaaagtgctgggattacaggtgtgagccacagcacctggactgctaatctgttttgtttgctcaatgtgattctgctgatattcatccatatcgctgcatgtggctgtaaggcttgcattttttactgctgcatagtattcctttgtatgaatcttctattggctattcatctgttctccaggtcatggacttttgggttgtttcaagctcaggtttattacaaaaaaaagtttttatgaccatcctcagacttcagacttgtgtgctggcacacatgagtaaggatggctgggtcagaaaatacatatatgtggccagacatggtggttcatgcctgtaatcccagcattttgggaggctgagatgggcagatcatgaggtcaagagatcgagaccatcctggccaacatggtgaaaccctgtctctactaaaaacacacacaaaaatagccaggcattatggcacacccctgtagtcccagctactcaggaggctgaggcaggagaattgcttgaatccaggaggcggaagttgcagtgagccgatatcacgccactgcactctagcctggaaacagagcaagactctgtctcaaaaaaaaaaaaaaaaaaggagggaaagaaagaaaagaaaatacatatatgctcagcttcacctgataatgtcatgttttttattgggagtctggcgattttcatcataccaacacagtataatcatcggttcctctatgttttgtttttgttttgttattggtttttgttttttcttgagatagtctcactctgaggcccaggctggagtgcaatggtgcaatcacagctcactgcagtctccacctcctgggctcaagcgatcctcctgtctcagcttcccaaggagctgggactacaagcctgtgctaccatgcctggctcattttattttttttagatggggtctccctatgttgcccaagctgttctcaaactcctgagctccagtgatcctcctgcctcggcctgccaaagtgctggaattccaggcatgaggtaccgtgcctggctctaagttcttgccaacactttgaattgtccaagttttttcactgggcctatgtggagggagggaaggagtgcctcatttgggttttggtttgctttctgattgctcttgacgttgaactttttatgtgattactggtttctttttatggtgaaatgcctgttcaagtcttttatccatttctttctctttttttttttttttttttttttgagactgaatctctctctatcatctaggcttgagtgcttctactaatgttgacatcttatatattgttacagggtacattttgagatggagtcttgctctgtcgcccaggctggagtgcagtgttgagatctcagctcactgtaacctgtctcgcagattcaagggattgtcctgcctcagcctcccgagtagctgggattacaggtacactctctatcatgcccggctaatttttgtattttttgtagagacagggtttcaccatgttggccaagctggtctccaactcctgacctcaagtgatccacccacctcggcctcccaaagtgctgggattacaggtgtgagccactgcactcggccttttgtccatttcttaaaatttcactgtctttttctattgatttatagttcctatgcatattaggaacaaatcctttgttagtttcatttgttgtaaaaatctccaattttgtagcttgtcttcactgtatttactgtgtcattttctgaacagaagctcttactttttcttttctttttttttgtttgtttgtttgttttaggcaggttctcactctgtcacccaggctggatgcagtggcatgatcacagctcactgcagcctccacctcctgggctcaagccatcctcccacctcagcctccctggtagctgggattacagtcacatgccaccacacccagctaatttttttttttttatcttttgtagagatggagtttcgccatgttgcccaggctgatctgggactactgggctcaagcaatcctcctgcctcagcctcccaaagtgctgggattataggcatgagccacttcactcgacctaaactttttatttgggaaacaaaaattttagacatacagaacagttgctgaggtatagagttgcattttacagtccatcctatatacccttcacccagcttctaataatgttgacatcttatatatggttacagggtacattctgagacggagtcttgctctgttacccaggctggagtgcagtggcgcgatcttggctcactgtaacctctgcctcccaggttcaagggattgtcctgcctcagcctcctgagtagctgggattacaggtatgctctctaccatgcccggctaatttttgtatttttagtagagacagcatttcaccatgttggccaggctggcctcgaactcccagcctcaggtgatctgcctgccttggcctcctaaagtgctgggattacaggtgtgagccaccacatccagcctacttatatatttttaatgcatttagtggtgggggtctcgctatgttgcccaggctggtctcaaactcctagtctcaagcaatcctcccaccacagcctctagcaaaatttaccatttcgaactggataattcagtggcatttcccacattgactgtgttgctatgttgttgtgcattaatcacctctgtccagttccagaacattttcattaccctgaaataaaaccccatcccgattagcaatcactccctttcccccacgcccagccccaggctaccattaacctgcttctcatctctgtggatttaagttattcaacttgctcagtcttttgcagtgtaggacaccatgtctaactcatagcatacttgcttgtttaagaaatcctttcccgggtgggtgcattggcttacacctataatcccagcactctgggaggccaaggcgggaggatcacttgaacccagaagttcaagaccagcccaggcgacatagggagaccccggctctacaaaacatacaaaaattcgccaggagaggtggtgcacacctgtagtcccagctacctgagaggctgaggtgggaggatcaccggagcctgggaggtcgagactgcagtctgcaatgagctgtgattgtgccactgcactcaagcctgggtgatagagtgagaccccgtttaaaaaaaaaaaaaaaaggaaagaaagaaagaaaaagaggccgggtgcggtggctcacgcctgtaatcccagcactttgggaggccgaggcgggtggctcacgaggtcaggagaacaagacaatcctggctaacacggtgaaacccgtctctactaaaaatacaaaaaattagccgggcgtggtggcaggcacctgtagtccaagctacttgggaggctgaggcaggagaatggcatgaacacgggaggcagagcttgcagtgagtggagatcatgctactgcactccagcctgggtgacagagcgagactccatctcaaattaaaaaaaaaaaaaaagagagagagagagaaagaaagagaaaaagaaaagaatagaagagaaggaagggagggagggaggaaggaaggaagggaaagaaagagagagagggagagagggaaagagagagagacagaaagagagacagaaagagaaaaaagagaaagaaagagaaagaaagaaaagaaggaaagagagaaaggaaaggaaagaaacaaagaaaaaggagggagggagggaaggaagggagggagggaggaaggaaggaaggaaggggaaagaaaggaaagaaatcattttctgccccagcgtcataaagatcttcccatacgtattctacattttttgagtcttgtcatttgcagtcatgtcttgacttctcttggaactgatttctgagtgtggagtaagataaagtccaatcgcatattttgtccatggggatgatctattgtcccaataccctgtaatgaaactcacaaagcaagttttcatgcatgtgtggatttaacagcaagcatagaccaaccagaagtcaagcagtgctgctggatgtctgcccacctggaagtctggtctaggatctctcttctgtcccagaggctgatctattcctggtagaagctttgtgctaatcgtttacatctgccaacaccagtcactcatcttgctctgcttcacaagcatctgacttattctttgctttcttctcagctttttgggttgcatggagaaactcagttgggacttagattggaattgcattgaatctataaaccaaatcaggagaatgagcatcttttgtgattgaatctttcaaagtgaacatacagtgaataattccatttatctatctttcagcaaagcttataactttgggatttttttctagatgctttgagtatttggtgctgtggataagtggcctatttatttgggggacagggtctgactctgtcaccctttctggagtgcagtggtgcaatcatacctcattatagccccaacctccctggctcaagtgatcctcttgcctcagccaccccagtagctgggactacaggtttatgtcaccattcttgactaattttttattttttgtagatacggggtctccctatgttgcccaggctggtcttgaacccctgggctcaagcgatcctcttgcctcatctcccaaagtgctgggattacagtcgtaagccactgtgaccagcatctatcaagctttctcaactttttgtaaacccaataattagatgtgcacattctttgggagtttattgcgtatgaggatgttatctgcaaataaagacactcttttttttttctttttcctttttttttttttttttgaggcagggtctcgctctgtcacccaggctggagtacagtggtgcgatcttggctcactgcaacctctgcctcctgggttcaagcaattcttgtgtctcagcctcccacatagctgggattaccctccccaggctcaggtgatcctcccaccttagcctcctgagtagccaggactacaggtacacaccaccatgcccagctaattttttttttttgagatggattctcactctgtcccccaggctggagtgcagtggcgcaatctcggctcattgcaacctccacctccctggttcaagcaattcccctgcctcagcctcccgagtagccgggattagagaagggacaagagtgagtccaggtcaggcaagccaccacgcccagctattttttgtatttttagtagagatggggtttcgtcacattggccaggctggtctcgaactcctggcctcaaggtctcgaacgccttggcctcccaaagtgctgagattacaggcgtgagccaccgtgccaggcctaaagacacccttaattcctcctttccactcctcagaactttcatttcttgttttctttagtaaaatgcgcagcaccatgttaacaggcattcctgccttgttccaattctgaaagagaatgtttcaacgttcatcattgatcatttggatccaattaatttttaagccctggtgcctcatttcattcccaccaacagcatagctcggctgattcgaaaggtattgatttgagctgtctcctcctccctccaattaattatgccatgctgcttctgtcttctcttgccctctcttctctgtggccccctctttttttttttagacacagttttcctcttgtcatccaggctggagtgcagtggcatcatctcagcctgcaacctccgcctcccaggttcaagcgattttcctgccttagcctcccaagtagctgggattacaggcatgagccaccacacctggctaattttgtatttttagtagagacggggtttcaccatcttggccaggctggtctcgaactcctgaccttacgtgatccacctgccttggcctcccaaagtgctgagattacaggcgtgagcctccacacccggccggccccctcttttatttatttatttatttacttatttttgagacagtctttgtcacccagactgaagtgcagtgacaagatctcggctcactgcaacctccatgtggccccctcttaacttcattcccctccaggtgcatctgcatttggagcctttgcaaaccctgtgtgactctctgtgtctttccatctctcttctcttggcttccaatttcatgctttctctccaccaccctaggaaacccacaaagaaaaataatggaaagagaagtgatgggagataatgtacaggctggtgaaaagtacaacccccccacctgcagagtgaggctaccactgccagcaaatgcagacacatcattcctgccttgctgagctccagggcttccccagggaccctgctcttatcaaaacctgcccacccccggtgccaaaagcagcgatgaaaacatctgggctttagatgagaagagtttcacggcacagcatctgtccagctcagcttttgaatggagaatgaatggtaagagctttttttcttctttttgtgagatggtgtctcactctgtcgcccaggctggagtgcagcggcacaatcacggctcactgcagcctcgacctccccaggctcaggtgatcctcccaccttagcctcctgagtagccaggactgcaggtacacaccaccatgcccagctaagtttttttttttttttttgaaatggagtctctgtcgcccgggctggaatgcaatggcgcaatctcggctcattgcaacctccacctctctggttcaagcaattcccctgcctcagcctcccgagtagctgggattacaggcgcacgccaccacacccagctaattttttttgcatttttagtagagaaggggtttcaccatgttggccaggctggtctcaaagtcctgacctcaggcaatgtgcccccttcggcctcccaaagtgctgggattacaggcatgagccaccgcgcccggccccagctaattttttgtacttttgtagagatgaggtttcatcgggtttcccagtctgctcttgaactcctgggctccagcaatcctcccaccttggcctcccaaagtgctgggattacaggcataaggtacccgcacccggctgggcagagctttttctagcagccccaatccaaggcaaacttgcttggtcttcagataaattcccagtccttacggggtgcatttgatgttcctggcactgtgcaaagctccatggagtagacggataccgatgagacgtcaatttgttcagccagcgtttgctggtgccatctggatgctgggaactaagcttgtcaccaggttctgccaggcgacattgtccctagcatgggaagtgggaatgaacaagcaggcagaggaagtcaaggacgattatgaggcgatgggaagggtctggtgacagagagggatggaaggggtgggggaatctgcttcccggaggaggcaacacgagagccaagatgtaaaagaggtggagccaggcagggagagagatgagggacaggcattcacaggacaggtgcaaaggccctgaggtgaggctgtgcctggtgtgttggagaagccgagaaggcttgtgtgaatgagtgagggggagagaggaaaagagagaaaggggaccggacatggtgactcacccctgtaatcccagcactttgggaggccaaggcgggcagataacctgaggtcaggagttcgagagcagcctgcccaacatggtgaaaccccgtctccactaaaaaattacaaaaattagacaggggtggtggtgcacgcctgtagtcccaggtactccagaagctgaggcaggagaatcacttgagcctgggaggcagaagttgcagtgaacagagattgtgccactgcactccagcctgggcaaaacagcgagactctgtttcaaaaaaaaaaaaaagaagaagaagaagaagaagaagaatagagagaaagggaactgcgggggaaggtcattcagggcctcagggcaggggatggagaaggctctggaatttactctgagatggacagacagagagatggagagagagtgactgagaaggaagaagagatgggggttcagctctgcaagacagggctgagactccagcccaagcctaagtggccactgaggtcttgttctaacccgtgtctccccacccccagacctctctctgatgcccccaactgcactggcagggagtgaccaccttgaacggaaaacggaatcagaacactgtgggcactccataaacatgagtgagtcagtacgtggtggagggagtgagggagggatggagtcgggggcggggaggggggcaggtcagcagggatacagactatgccaggcctcctgatcacaggaaagagtgtgggctatactatgagggtaatagggagccacgggagggctttgagcagaggaagggcgtgatctgctttatgatttttttttttttgagatggagtctcgctctgtcgcccaggctggagtgcagtggcgcgatctcggctcactgcaagctctgcctcccgggttcacgccattctcctgccttagcctcccaagtagctgggactataggtgcccaccaccacgcccagctaaatttttttgtatttttagtagagacggggtttcatatgttagctaggatggtctcgatctcctgacctcgtgatctgcccatcttggcctctcaaagtgctgggattacaggcgtgagccaccgctcccggcctgctttatgattttaagaatccatctggggctccctaggggagcaaggatggctgggggcaggagtgtaggtggcagggagccaggacagcatccacacaagatacagcaggccccttaggagctcagggaggctcagtttcattctggagccggagactgcaggacctgctgatgcactgaacatgcagggtaaggaaagagaagggacaagaatgagtccaggtcaggtgcagtggcttatgtctgtaatcccagcactttgggaggccgaggcgggaggattccttgagggagaccaggattttgagatcagcctgggcaacagagtgagaccccatctctacaaaaatttttaaatgagctgggcatggtggtgtgtgcctgtagtcccagctactcaggaggctgcagtgggaggactgcctgagccaaggagatggaggctgcagtgagctatgactgcactactgcactccagcctgggtctaggtgacagagtgagactctgtctcttttttagtttgtttgttttgttttgtttgtttgagacagagtctccctctgttgcccaggctggagtgcagtggcacaatctcggctcactgcaacctccgcctcctaggttcaagcgattcttgtacctcagcctcctgagtagctgggattacaggcacccgccaccacgccccactagttttttgtatttttagtagagacaggttttcaccatgttggccaggctggttttgaactcttgacctcaagtgatctgcctgcctcagcctcccaaggtgctaggattacaggcatgagctaccacgctcggctgaccctgtctcttaaaaaaataaaataaagagggccgggcgcggtggctcacgcttgtaatcccagcactttgggaggccgaggcaggtggatcacgaggtcaggagatcgagaccatcctggctaacacagtgaaaccccgtctctactaaaaatacaaacaattagccaggcatggtggcgggcgcctgtagtcccagctactcacgaggctgaggtgggaaaatggcatgagcctgggaggtggagcttgcagtgagccgagatggcgccactgcactccagcctgggcaacagagcaagactccatctcaaaaaaaataaaataaaataaaataaagagcgtatccaggaatcaggacccaggctactgtgtgatagtggaggcaccaacaggatggagaaggggcagatctcagggcgagtaactattctaagagccaggttttggccttgtgagtgtgaaatgcctgcaaggcactcagtggaaatatccaatgccattggatactgaggcctggagctctggggagatgcaggctggagacaccaatgggatagtcgacaacacgcaatgaggtgtggctatttggggcaagggcatagatacaaggtcaagggacaccctgctcttccaggactatcaaagccaagacatcacacccaggggtccaccctttacaactctgtccatgcccaacgccagtccctgttatcaggtcagcaggaatgctacctgcagggaacatggaattcagtgtccttgggcttaccataggtgctcctcttcttctctcaagtgcctatttatttatttatttatttatttatttatttattatttgagatggagtatcactctgtcactaggctggagtgcagtggcgcaatcttggctcactgcaacctctgcctcctgggttcaagcaattcccctgcctcagcctcccgagtagctgggactaccatgcccagctaatttttttttttttttttttgtattttagtagagatggggtttcaccgtgttggctaggatggtctcaatctcctgacctcgtgatccacccgcctcggcctcccaaagtgctgggattacagtcaagtgctcatttatagatggggagactgagttcctgagagtttggggcagcaggcagcggggcgggggagggggacaaggctgggacgtgaagtgggtctggagtaactctcagaataggccgtttctgcaatgcagacgtctgtgtaatcgttcattcattcaatgaacgtagtttggatccacacccttgcccatctcgcgctgatctgaaaggggacgtttctgttaggtgtggtggctcacgcctgtaatcccagcactttgggaggccaaggtggacggatcacctgaggtcaggagctgcagaccagtctggtcaacatggtgaaaccccgtctctactaaaaatacaaaaaaaaattagctaggcgtggtggcgcctgcctgtagtcagtcccagctacttgggaggctgaagcaggagaatcacttgaacctcaaaggcagaggctgcagtgagccgagatcacgccactgcacttcagcctgggtgcaacagagtgagaccccatctcaaaataataataatgatgatgataataatcataatgatgaaaggggcatttcaacgttcaccattgagcactcggatccaattaatttttaagctctggtgccccattttcttccagccaacagctcagctaattccaaagctattgatttgagccttctcatccctccacttaattatgccggtgctgtctgtatcttctcttgcccttttttctctgcggctccttctttgccaaggtcaagggtccagcgagcaaggaggatctcgctcagcacagggaattggaggaaggacattcctggccgagggcagggtgtgtgcaaaggctctgagattggacctcttattgaacttaattgtagctgtcaggctgcctggggcagagaaatcgatgagggcaaacttggcttatcgcctataaaatgaggataaaaaataatggtttctgccaggtgcggtggctcaagtctgtaatcccagcactttgggaggccaaggcgggcagatcacctgaggtcaggagttcaaaaccagcctggccaacatggtgaaaccctatctctactaaaagtttaaaaatcagctgggcgtggtggcgggcgcctgtaatcccagctactcgggaggctgaggcaggggaatcgcttgaacccaggagccagaggctgcagtgagccgagatcgcgccactgtactccagcctgggcaacagagtgaggctctgtctcaaaaacaacaacaataacaacgacaacagataataataataataattaataataatggtttcccagagaattaaatgggacaaaggcaacatcaatcttttgaaagttccaggccctgccctgcagggatgtagggtggaaataacactaggctgcaaaatgactggatgggcctggagtggttggatgggattggatggatcataaacaaaagtgattggattggtcaagaggaggagacggaggcaggaaataaaggcagacaaaggaacgtaataggttcagacccaatggaggcgaggttccggactcagagagggggcctcagcccaaagttcccagagtggccagctgggggcagcataagccattaggccatcccagggctgggagcagaggggaaccagggaccctctgtgaccctctgacggaggttaacttatttgacatgtgcctgcagtgtgccagacatggaacagaactctacaagcactcatttaatccccataatagagtttgcagatggggaaactgagaacaacaacgttaagttgctcacccaacgtcacacatcaggggagtggcagagcttggatttgaatttaggaagcccagctgaggcccttaacctctgcactctactggctctccttcccctaaatctcctaaaatgacagtttaaaactttttttaaggtggcgccgggtggggggtggggggcgggtgtgggtagggcacgggcatggtggctcatgcctgtaatcccagcactttggaaggccaaggcgggcagatcacttgaggtcaggagttcgagcccaacatggccaacatggtgaaaccccgtctctactaaaactacaaaaattagccgggtgtggtggcgcctgtagtcccagctactcgggaatctgaggcaggagaatcacttgaacctgggagacggaggttgcagtgagccgagatcacgccactgctctccagcctgggggacagagcgagactccgtcccccaccagaaaaagtcaggccagacgtggtagctcacacttgtaatcctagcactttgggatgcggaaagattgcttgggctcaggagttcaagaccagcctgggcaacaatagtgagacctcatctctactttatttattttatttatttatttattttctgagtcagagtctcgctctgtcacccaggctggagtgcaatggcacaacctttggctcactgcaacctctgcctcccaggttcaagtaattctcctgcctcagcctcccgagtagctgggattaaggcgcctgccactacgcccagctaatttttgtatttttggtagaaatggggtttcaccatattggccaggctggtctcgaactcctgacttcgtgatctgcctgcctcggcctcccaaagtgccgggattacaagcgtgagccaccacgccaggccctctactttaaatatgtatatattttttaagtcaaaaaaagcaagggctccctctcaacactctttctgtgtatctcacttatatgtcaactctggaagtgggtaccatcatttccattttacagatgaggaaactgaggcacaaaggagtgagctgagggccaggtggtgttatgtccaatgtaagtatcctaagagcatgtgaaatgaatttttggttgggcctggcttggaaaggggccagcacgaaccttgtcttctgcagcctccagtacctccgctgtcgccactggatccagccatgtccctagacccgccctagctcagggctacacccggactcactctgatcctccaagtcctgtttccccactctagactggctggagacctcgtggactcacaaccaacctaagaggttgaagtagggaggggagagaacactcaccgtggggcctctctttcctttgacccgtgagaaaaccatagaccagggatgccaaggcatttgcccaaaccacccaggtagtaggagacattgctggaccccaactcaggggtttgacttctcatatctataggaccaccataaggggactgtcaggcaggcctatctcagacccttggtgcccgcagctgaaaagcactctggggccctatgaaaatgctttaccgggcccggtggctcacgcctgtaatcccagcactttgggaggctgaggtaggcagctcacctgaggttaggaatttgaaaccagcctggccaccatggcaaaactccatctctactgaaaatacaaaaattagctgggcgtggtgacatgtacctgcaatcccagctactctggaggctgaggcaggagaatcgctagaacctgggaggcggaggttgcagtgagccgagatgacgccactgcactccagcctaggggatagagcgagactctgtttccaaaaaaagaaagaaaaaaagaaaaagagaaagaaagaaagaaaacgcttgagacccagaggcctgttcactttggctccaaaatgcaaaaagagaactgcaaagtccaaatgaatcgatgtttaattacattcagacacaggatgtcacctttatttgggttaaattcaatgcatctagaaacagccccggggttggttcactatccctaggaagacctcaggcagattgctaccagctgccagagagctacttgtagccagtagatttccaaaataaaatgataaattacaagaattaagtaataccaggtgagcgcttagcatatgcagggttacaccctcgggctgttttaactcttttaatccccacagcgaccctaccagttcaattgatggcgaaaccaaggcccagggaggtcgcacctctggggagagacagagctgagatttgaaccccaccaagcttggtgtctgtgcccttgactcctcaacctcacgttttacaatagggtcattagtagaaagggaggtgcggggacgttggtgaccgttagacttgctgcgggtctggatgtcgacacatggtgctgcttgggggcccagacgtgagcaggaattggaaactgggtctggacccaggttggtcacctccgccggggtaacaacactgcgcgccactttggtaggtcgcatccagctcgggatctggaccacgtggctgggatgcagcacagcccctgaccacgcccctgtgactgccgctgcctggaccacggctggcgaccaatgagaaggcgcacatcaaaagctccgcctacaaggccgttcttgcttgctgattggccatttcagcttcccatcacctctcccatcctctggcctacagcctccctggaatttttcccacacatctcccccgcaggcctttgcacacgctgttcccacagccagagataccttttcccctcttctccgggataaactgctttatccccccttctctgctaagatggcccctcctccaggaagccttccctgactcccaaaagtgagtggaggaggtcagctgctctcatcacattagttttcttatttgcctcccaagcaggctataagcttcttagaagccaggactgggtctcagatagctttgtctctccattgcctcacatagtaggtactcaagaaacgtatgtcaaatggaataattaatgaattaatctggtctcaaagattgaggagcactgagctagcagttaggagctaggaaatcctgaaggcagggctgggacacccgctgctggcttggcacagagtctaacacacagtgagtgctcaatacatgtgtgtggaatagaggagggaagggacatgtacatcatccctgaggacggcccacagtatgtgcttgatgttggctcactgcaccatttcatagtcccccacagccccagggacctaagtcagtcttatcacagttccagcctgtccagttggccacctctttccccatttgccccccatagccagccctgaggatggtggcgggaacatggtttcactctgtcgcccagagtggagtgcagtgctgtgatctcgggtcactgcaacctccacctccggggttcaagcaattctcatgcctcagcctcccaagtagttgagactacaggtgcgcaccaccacacctggctgatttttgtatttttagtagagacagcgtttctcatggtggccagattggtctcgaactcctgacctcaagtgatctgcctgcctcaacctcccaaagtgctgggattacaggagtgagccaccacacccagcccaagccatatatttcaaaacaaaaatattcagccgggcccggtggctcacacctgtagccctggcactttaggaggctgaggcagtggatcacaaggtcaggggtttgagaccagcctggccaacatagtgaaactccatctctactaaaaatacaaaaaatcagctgagtgtggtggtgggctcctgtaatcccagctatttgagaggctgaggcaggagaattgcttgaacctgggaggcagaggttgcagtgagccgagatcatgccactgcactccagcccgggtgacagtgcgagactccatctcaaagaaaaattatatttatatatataatatatataatatacaatatatagtatatatactatattatatattatatatagtatatacgatatagtatatatactatatatatcatatatactatatatagtatatatactatatatatcatatatactatatatagtatatatactatatactatatacactacagtatatattttatatactatatatactatagtatatattttatatagtatatatactatagtatatattttatatactatatatactatagtatatattttatacagtatataaaatatatactatataaattatatatactatatattgtatatattatatatacaatatataatatacgtatatataatatatagtatatagtatatataatatataaatatataatatatagtatatagtatatataatatataaatatataatatatagtatatagtatataaatatataatatatagtgtatatataatatataaaatatatactatataatatatattatataacatataaaatatatactatataatatatattatataacatataatacatattacatatataacatataatatattacattatgtataaatatataatatatattcaccatcaacttccactctgtgagaatcaattgcaaccacactctcttctcccaagagaccccctgtggtccccttcagagcccccagttcctctacccagggcacctcctgctttcaccccttcttccagcccattcatgatcacctggagagtctgtatctggttctgtctccctgagcctggaggatccttgaggccaggctggagtgagagtagcacagagggtttggctggtggtagtggggagggggattgttgagtaaatgaatgcatcatctgactggcaaactcccacacactcctcgaaaccccagttgcaaagtctcgtttttcaggataagttccctgtctccccagacatagtccccactttcccagctcctggcttcaccctctatcccagccctgacatcacagagatgggggacatctgtgtccagctgatcttcctccagacagatgtctccttgggcaccaggactgagaccgcttgggtatgccagcatcacccagcacaggaaagttgtcagggagtgtttattgaatgaatgaatgaatggatggatctcttgcagggcctacagtcagttcccctgggttcacatcccagtcattgcacaggtcactgaatctgtcccttgatgtctctgaccctcactttccaggcaactacatgtgtttactcgaagcccatgccccaggtggttgtgaagataaactaacacacaaatcttgtgactaaagggacgtcaggctccctggcatcccagagcaggagtgaatttcacccagaaccagcagctctgtcctccccctgccaccccacaggtgaatcgccccaccactagcatcagcacccagaacaggaatgttgtcaacacaagtgcttagtgaatgctgatacatagggttggcctgaggacgaggcaaggagacaagaaaggtggctattaaaaatctaacaacctgagcttggtacagtggctcatgcctgtaatcctagtgctttgggaggccaaggtgggaggattgcttgagcccaggagtttcagaccaacctgggcaacatagtgagaccctgtctctaccaaaaaaagaaaattttttttttcaaattagctgggcacgttgccatgcacctgtagtcccagctattcaggaggcagaggcaggaggatcacttgaacccaggagatcaaggatgcagtgagccatgatcatgctcctggactccagcctgggcaagagtgaggccttgcctcttataaaaataaaaaaaacgtgtctgggtgtggtggctcacacctgtaatcccagtgctttgggaggccgaggtgggccaatcacatgaggtcaggagttcgagaccagcctggccaacatggtaaaccccatctctacttataatacaaaaattcactgggcatggtggtgggcacctgtaatctcagttactcgggaggctgaggtgggagaatcgcttgaacctgggatgtggagattgtagtgagccgagatcatgccaccgcactccagcctgagcaacagggtgagactccgtctcaaaaaaaaaaaaaaaaaaatctagacccggtgtagtggcttacacctgtaatcctagccctttgggaagccgaggcaggtgaatcgcttgagctcaggagttcaagatgagcctaggcaacatggcgaaactccctctctactaaaaatatgaaaattagccaggtgtggtggcgtgcacctatagttccagctacttgagaggctgaagtgagaggattgcttgaacctggaggaagaggctgcagtgacctgagatgatgccactgcactccagcctgggtgacaaagtgagaccctgtctaaaagaaaaaaacaaaaaggccaggcgtggtggctcatgcctgtaatcccagcactttgggaggccaaagcgggccgatcacgaggtcaggagatcgacaccatcctggctaacatggtgaaaccccgtctttactgaaaatacaaaaaaaaaaaaaaaaaatagctgggcatggtggcgggcgcctgtaatcccagctacttgggaggctgaggcaggagaatggcgtgaacccggaaggcggagcttgcagtgagctgagatcacgccactgccctccagtctgggcaacagagcaagactccgtctccaaaaaaaaaaaaaaaaatctgacaactgaaatgttggtaggaaacagcctagatatttgttatccagccattccaaccctgggtactcaccggagagacagggggtatattcaccaaaagatacgtataaaaaggcttaaaacagcttttttctttaaagattttttgagacacaggatctcattatgttgcccaatctgttctcgaacttctggcctccagcaatcctcctgcctcggcctcccaaagtgctgagattacaggcgtgagcccccacgcctggcaatcaaaacaacaactttatccacaattgtcaacaccttgttgaggctcagaaaacaaacccctaaaatgaaggtctcagaaacaccagattttctctgaccttcttcgctgtctccgaggacccttcccctccgccagggttaccacagaaactagaattattttccccaaagtaggacagagaaaccagaactccttttccccaaagccagccataagccctaaaaatatgactaacttgccctctgcccttctgtgtaaaaactggccataaagaaattggccgggcgcatggctcacgcctgtaattccagcactttgggaggcagaggcagatggatcattttaggtcaggagttcgagaccagcctgaccaacatggtgaaaccccatctctactaaaaatacaaaaaaaaattacctgggcacagtggcatgcgcctgtaatcccagctaattgggaggctgaggcaggagaatcacttgaatctgggaggcagaggttgcagtgagccgagatcacaccactgcactccagcccgggagacaagagtgagactctgtcacaaaaaaaaaaaaaaaaaaaagagaaatgatctaacctaccttgtttgactgtacgccataagatccccattccagagagggttttgccctatacccagaaggaaagaacgctgctcagagaagccaagaagaatctagacagacaggccttgcagggtttccccactctgtctctgcacattgaaccttttttgccccatgtttgtttttgttttgttttgtgctttgttttttggagacagaatcttgctctgtcacccaggctggactgcagtggcgtgatctcagctcactgcaaactccttctcccgaattcaggtgattctcctgtgtcagccccccaagtagctgggattacaggcacccaccaccatgcccagctaatttttgtatttttagtacagatacggtttcaccatgttggccaggctggtcttgaactcctgaccacaggtgatcctcccgactcagcctcccaaagtgctgggattacaggcatgagccaccgtgcccggccagcccaatcttatttctacatcgctgctcatactttgttaaaccaaagcataaaaacggacaacttcccctgtgtcttgggggcttcattctgaaggctcccgcatatacaggttaaataaacttcaatgccttttttcctagtaatcaatcggccccatggcaatgacttttctgtgaaccttcagagggtcaaggaaaacttaacccctttatccctgcaacctggaaacaacccaaatgcccaccaataggtgaatggatagtgaaaaattggtacccagtggttatgtttttttttttttttttttttgaggcggagtctccctctgtctcccaggctggagtgcagtggcgtgatctcggctcactgcaagctccgcctcctgggttcacgccattctcctgcctcagcctcccaagtagctgagactacaggggaccgctaccatgcccggctaatttttgtatttttagttgagacggggtttcaccatgttagccgggatggtctcgatctcctgacctcatgatcctcccgcctcggcctcccaaagtgctgggattaacaggcgtgagccatggtgcccggccttttttttttttttttttttttttagataaagtcttactctgtcacccaggttggagtgcagtggcatgatctcaactcactgcaacctctgcctcctgggttcaagtgattctcctgcctcagtctcccaagtagccgggattacaggtgcccacgaccacacccggctaatttttgtatttgtagtagagatgaggtttccccatgttggccaggctggtctcgaactcctgacctcaagtgattggcctgccttggcttcccaaagtgttaggattacaggcatgagccaccacgccccgccatgattttttttttaataggaaaaccccaccaaagtgttggtgaggatgtgggcatattagaacctccatacgatgctggtgggagcgtaaaatagtgcagctattgtggaaaacagtctgggtctggcagttctacaaaaagctaaacacaggctgggtgctatggctcatacctataatcccaatactttgggaggccaaggtgggaggatcacttgaagcccggagttcaagagtagcctgggaagcataggaagtctttatctctaaaaacaacaacaacaaaaaaaataaaagttaaagggctgggcgcggtggctcatgcctgtaatcccagcacttggggaggctgaggtgggaggatcacctgaggttgggagttcaagaccagcctgaccaacatggtgaaacctcgtctctactaaaaatacaaaatattagccaggcgtggtggcacgcgcctgtagtcgcagctactcaggaggctgaggcaggagaattgcttgaacccgggaggcagaggttatagtgaaccgagatcgtgccactgcactccagcctgggtgacagagcaagactccatctcaaaaaaaaaaaaaaaaaaaaagaaaatgtatattcacacgaaaacttgtatacaaatgttcatagcaaaaaaaagccaaaaggtggaatcacaagagccaataattgtgatagccaaaaggtggaaacaacccaaatgtttattaacagatgaacggataaagaaatgtggcccggctgggcccggtggctcacgcctgtaatcccagcactttgggaggccaaggcgggcggatcacaaagtcaggagattgagaccctcctggctaacacagtgaaaccccgtctctactaaaaatacaaaaaaattagccgggcatggtggcgggtgcctgtagtcccagctacttgggaggctaaggcaggggaatggcgtgaacccgggaggcggagcttgcagtaagccgagatcacgccactgcactccagcctgggcgacagagcaagactccgtctcaaaaaaaaaacaaaaaaacccacaaaaaacaaaaaaagaaatgtggctcatccatatacaggaatatgattcagccataaaaagggaataacgtactgacacaagatacaacgtgggtgaagctggaaaacattatgctgtgtgaaggaagccagctgcaaaaggccacttactgcctgaaatgcctagagtgggcaaatccttaggacagaaagctgatttgtggttgtgagggactgcgggggggagtgcataatagggagttactgctgttgaggatagcatttattttcttttttttttttcaatttttatttaaaaaattataggctaggcacagtggctcacacctgtaatcccagcactttgggaggctgaggtgggtggatcacctgagatcaggagttcaagaccagcctggccaacatggcgaaaccctgtctctactaaaaataaaaaaaatagccaggcgtggtggtgcatgtctgtaatcccagctactcaggaggctgaggcaggagaattgcttgcacctgggaggcagaggttacagtgagctgagatggtgccactgcactgcagcctgggtgacaaagcaagactccttctcaaaaaaaaaaaaaaaaaaaattccgaatagagcgatagggtttccttatgctgtccagcctggtcttgaattcctgggctcaatggatcttcctgcctctgcctcccaaagtgctgggattacaggcatgagccaccatgcccgccctaggacagagtttctttttaagaggatgaaagtattccggaactagatattagcgagggtggcaggacgttgtaaatgcactaaatgtcactgatttgtacactgtaaaatggttaaaatggaggccgggtgcagtggctcatgcctgtaatcccagcactttgggagtctgaggcaggtggatcacctgagctcaggagtttgagaccagcctgggcaatacggcaaaatcccatctctacaaaacatacaaaaattagccagcagaggtggcctgcacctgttgtcccagctagtcaggaggctgaggtgggaggactgcttgagccctggaggcagaggttgtagtgagctgagattgtgccactgcactccagcctgggtaacctgaccctgtaatcccagcactttgggaggtcaaggtggatctcttaagcctaggagtttgagagcatcctgggcaacaaggagatgccatctctacaaaatatacaaaacattagccaggcatggcggcgcacacccgtagtcccagatacttgggaggctgaggtgggaggatctcttgagccctgaaggtcaaggttgcagtgagctgagatcaagccagtgcacctcagcctgggtgatagaatgagaccctgtcttaaaaaaaaaaaaaaaaaaaaaggccgggcacggtggctcatgcctgtaatcccagcactttgggaggccaaggctggcctgacaccgggagttcaagaccagcctggccaacatggtgaaatcccgtctctactaaaaacacaaaacttcctgggcatggtggcaggtgcctgtaatctcagctacttgggaggttggagcaggataatcacttgaacctgggaggcagaggttgtagtgagtcgagatcacaccactgtagatagagagagagagagagagagagagactcattctgtcaagcaggctgggttggagtgcagtggcgtgatctcagctcgctgcaatctccacagcccagactcaagtgatcctcccacctcagcctcctgaatagcccacaaccacacctggctaatttttgtatttttagtagagacggagtttcaccatgttggccgggctggtctcaaactcctgacctcaagtgatccgcctgtctcagcctcccaaaatattgggattacaggtgtgagctactacacccagcctgaccatgtctatattaaacctcaacaaaactgttaaaataagaaaataattgccaggagaagatgagaatatccagcagtcctgagggctcagggttccgttttccccacaaatgccatcatctgacgcctctggggatggtgaccttgaaacagtcatggagctgggccagaaaccagagaccagagtcccatgcctgggatttgagcagtggtctcagaggcttctcagtttctagggaaatgcaccccacatgtcccacaccagagtcctcaagcttgggaaatgctttgggacaggaagacctcatggctccaagtactcaggacattatctcccaaaaacctaatgggggagaccttcatccccaaatcagatccccctagtggagacatttcttcaggccctgtaagaccaactagtaatagaattaataccaacaggccggtgcagtggcccatacctataatctcagcactttgggaggccaagtggggcagattacttgaagtcaggagttcgagaccatcctggccaacatggtgaaaccccatgtctctactaaaaatacaaaaattagccaggcatggtggtgggtaccgtaatcccagctactcaggaggctgaggcaggagaatcccttgaacccgggaggcggagcttgcagtgagccgaggttacaccactgtgctccaacctagcctgcttgacagaacaagactctctctctctctctcagaatgattctggcaagggcgacagagtgagaatccgtctcaaaaaaaaaaaaaagaaagaaaaaaaagaattagtaccaacaatcataattcacagcgtgggcagaaggaagtggatagacttccattcagaagctcctgggttcgaatcctggacccatccataaatacacaaggaaggaaggaaggaaggaatagtggacaaataggcctttcagcccattccaaaagactttatcatatcccttctcagatgcccaagccttgtgttgcacaaggccagggccccagagaggcctcaggcttccaaaagtttccagccttataggggagatagtgcccgacacagacactcccactactattactgctcacagcaataacagaagaaatcacaggcaggcgagacacagggaagggagccaagggggagggacaaggatagaggaaggatgccagaaccaaaaagagagagaggaagtggagtgcaagaatggtagacggcacgtggccagtggctgttacacactggccagggaggaagttgggctgaacaacctagataataaacggcagcgggaggctgattcgccttcccagatctttcccatttctgttctgcttttctttgcatactcccggagacagggagctcactcctgagaaaggaggttcaatgtttcctgggcatggaccactgtccagaagttccaagcaagatgatttgtcaagtagtagcccctatgggtcaaagggctaaagggggccaggcgcggcggctcacgcctgtaatcccagcactttgggaggccaaggcaggaggatcacttgaggtcaggagttcgagaccagcctggccaacatggtgaaaccccatctctgccgggcacggtggctcacgcctgtaatcccagcactttgggaggccgaggcaggcagatcacgaggtcaggagatcgagaccacggtgaaaccccgtctctactgaaaatacaaaaaattagctgggcacagtggcgggcgcctgtagtcccagctactcgggaggctgaggcaggagaatggcatgaacctgggaggtggagcttgcagtgagccgagatcgcgccactacccttcagcctgggcgacagagcgagactctgtctctaaaagaaaagaaaagaaaagaaaagaaaagaaaagaaaagaaaagaaaagaaaagaaacctcatctctactaaaatacaaaaattagcagggcatggtggcggacacctataatcccgctacttgggaggctgaggcaagggaatcgcttgaacccgggaggcagaggttgcagtgagctgagattgtgccattgcactccagcctgggcggcagaatgagactccatctcaagaaaaggaaaggagaggagaggagaggggagaggaggggaggggaggggagggagaggaagggaggggaggggaggagaggagaggagaggggagagaaggggaggggaggggagaagaggagaggaggggaggggaggagaggagaagagaggggaggaaaggaaagaaaagcctaaagaggattatctggggagagagaggtacccatgtgcgcaacgcaggcagtcccttgcacaggctggatctagagtaagacccacttgggttcaaacctgctctaccacttacaggcctggtgacttcatccctccaaatctcagtttcctcttctttcctctgaaagtgaccacagtaactgtgcctactcatctgtgcctacatacaagcacaaaactcatcgctttgtgcttgtatgtaatgagctaatgcaataaaatacctggcgcacaggaggtgcagaataagtgttgccctgttccaggcaggcccagagtgctccggttgtgtcccaaacacacatgtactttcttacctctaaaactttgcacctgctgtaaacttctgcctcaccagctcttgccccaccacccacaaggcaaactcctacacatcccttaaagccctacctacaagatagatttcttttctctgttcaagccctgacctagagagctgggagcatccataggcaccgggttctgatgcggcctactgtcatgtgatgtgagttcctggagggcaggagttctgacctacatgcagcaggcacgcaatcaaagcttgttcaatgaaaaaaaaaatgaatgaatggtcacttgggagaggcggctcccaagcggacacccaggagtcggccaacccctttaacgcccgcatcccctgctctccacgacctcaaagggcctgtaagtggtcgacaaaaaggggcggggatgcggtggttccgggcggggtcttcagcccttccggtgcggcccctttaagaggcggggcctgcggggcgggcgccgagaacgccggggcggcccgaagatggcggcggtggctggatctggggctgccgcggctccgagctcactgctcctcgtggtgggcagcgagttcgggagcccggggctcctcacctacgtcctggaggagctcgaaagaggtcgggctggcctgggggcccgcgggagcccgggaggcgggcccgttcgcgcgtctgggcccggggccggcggggtggggcggcggcggcggcggcggcgggacccgggctccggggcgggggtcgcgggcctggggctgggtccccttcaccgttaggcgcacgacgcgggcaaaggcggggtgcccgtgggtgcccgcggagaaagtggcatccgggcctgggctgggcagggctgccccgccccaactccgggtgaagataggggaggggacacgggcctgggcttggggacccttgcagttggaccacggctccgcttcccgcctgactggcctgcccgggggtagggcctggggtcgctttggatctccaggtcttagcagcttagatagagatctcccggagggagaagcagatatgggggaggctgggcctggagccccggggcccgctttctgttgcctcacaaggagctgctaattggggtgtgggcgggtgcggcctgccctggggatttggcacctagggaggtgagtcataggcgcacctgccaggttcacctgcagccacttggctcagtgggactggcgggcgtgatgcgcccgtgggtggagatgggtgttcatcccccatccctcggagcatctggacctggcgtttcattgcatgtaaaatgggacaggaacacgcacctcggttcatgtgcttgaggagtgtttagtgagcacctgctatgcgccaggcctttgggcagtggacacagggatatggccgggatgatagacaggttcagccctgccaacacaggtctggtttggggatggacccaaagcgagtgaggagatggaacaagcttccagctcacatggtgtcaggaaggatgagaaggctgcaagggactgagaggacagtcagtcttagcacccgaaggtgctgagggggaagggccccctggccagtaggaacaggtgggggcggcagggggatggacttccaggcaggggaaacagctgttgcaagggcggtgagtggaaacgggtctggcagggcataggagcagcgaggaggtggagatggaggaggtggaggctttgttgctgatgaatcttgtgtgtaaaatgatgaggtgtgctctgggtcccctggctcagctgcagcgagacctgaaggtgttgggtacttctgagtctccaagctgtgagtgaagggaggaggctggggcgctccccacccacggggtgctaattattgaaatattctgggagctggggggcccggctgaactcccgccttgatccctccttcccaccaggcatccggtcttgggatgtcgatcctggcgtctgcaaccttgatgaacagctcaaggtctttgtgtcccgacactctgccaccttctccagcattgtgaaaggtgaggctggggtccccctgactgctccctacctcttgttatttggggaagtgccagccgtgtgccaggcatggggggtgggatgcagctataaataacaacagtaataatacagttgagacctttcaaatgcaagccgtgacccagtgataaccccctcagtcctcagcaacccacagtgcaggaactggtgtttttgtccctgattgacagatgaggaaattggcattgaagggggaagaggcagggagatctctgaggagggggttttttgatgagaaactgctatgactggtgtgtccagtggaagggaagggccccagtcaagacccagcagtggacagaacatctagaatgaaccgggcgcggtggcttacgcctctgatctcagcactttgggaggccgcagcgggcggatcacttgaggtcaggagttggagactagcctggccaacgtggaggaaccctgtctctactaagaatacaaaaataacggcatggtggcaggcgcctctaatcccagctactcgggaggctgaggtgggaggatcacatgaacccaggaggcagaggttacagtggggctgagactgcgccactgcactcctgcctgagtgacagagtgggagggactctgtctcagaacaaacaaacaaacaaaaaacatctggaaggtggaggggcactgagcaggccctggaagatggagtgtgggccccttgcaggaagggactgatactggttcacagccacaggcctgggtatacagtaggcagggaactgaaaaggagtgagatcaagaagggcccaactcagcacgaggctcccttctagggtgacccagggtgagcagagcagcaggcgggcaggcagggcttgggtgttgcctgcagccgcccccggctcctgatggtctcttgagtcacctcccggctgctgctggagaggaaggaagtgtctgtagtctcattgtcccagttggtccttgtggcttcctgacacttcatggggcagaaagtggagctggaaatcctgtctgctgtgtgtgaacttcgtggccacttcccttctttatgccttgatttccccacctgaatggggcaatatccctgtgtggcaaaaagcgtgctaaggctgggtggggtggctctcgcctgtaatcccaacactttgggaggtcaaagtgggaggattttttgaggtcaggagttcaaaaccagctggggcaacatggtgaaaccctgtccctactgaaaatgcaaaaatgagctggacctggtggtgcacacctgtagtcccagctactcaggagcccgaggagggaggatcgcttttacccaggaggcagaggctgcagtgagctaagattgtgccactgcacttcagcctgggcaacagagcgagaccctgtctcaaaaaaataaacttaggcctgacatggtggctcacacctataatcccagcactttggaaggctgaggtgggtggatcacctgaggtcaggagttcgagaccagcctgaccagtatggtgacaccccatctctactaaaaatacaaaaattagctggttgtggtggcaagcgcctataaccccagctacttgggagactgaggttggagaattgcttgaactcaggaggcagaggttgcagtgagctgagatcgtgccactacacttcagcctgggcaatagagggagattccatctcaaaaaagagagagagagagagggagggagggagggagggggagagggagggagagagagagagaaaggaaagagaaagctaaatgtgataagggcgagagagagagaaagggaaaagaaggaaagaaaggaaagaaagttaaatgtgataagggctggcaacactggagggtctctgcctctcaagactcagccttgttcacagttcagtcctgcctcaggggccttggctggtgctgtaccctggtccgggttggccctcaccggcccccaccccggctctggctccttgccacccccctctcacagtactgatgtttaaaacacatacgggccctgggggacagagcagggtcaggatcccagaaacagccctacttcagccccggcccttatgctgccccacccctagctgagtcctgcctcaggacctttgctccggatgtaccctcgtccacgttcgccctcattggccctcctcgagctctggctctctgtctgaaaaataaatgtggccggatgggtgcagtgggtcaagtctgtaatcccagcactttgggaggccgaggcaggcggatcacctgaggtcaggagtttgagaccagcctgacccacatgttaaaaccccgtctctactaaaaattgaaaaaattaatggggcgtggtggcgtgtgcctgtaatcccagctactcgggaggctgaggcaggagaattgcttgaacccaggaggcggaggttgcagtgagcccaggttgcactgttgcacgccagcctgggcaacaagagcaaaactccgtctcaaaaaaaaagaaaagaaaaaggccgggcgcggtggctcacgcctgtaatcccagcactttgggaggccgaggcaggcggatcacgaggtcaggatatggagactatcctggcttacacggtgaaaccctgtctctactaaaaatacaaaaacttagccgggtgtggtggcgggcacctgtagtcctggctactcgggaggctgaggcaggagaatggcgtgaacccgggaggaggagcggagcttgcagtgagcagagattgcaccactgccctccagcctgggcgacagagcgagactccgtctcacaaaaaaaagaagaaaatggtggcatcactcccaggggtgacagctgcaaaccaggccctgcgcacgatggggccctctggttactgcctctcttaggccagctggggtggtttgagtttctctttcttgcctggtcctgacctgcagctctgccgtgcgcctgttaatctccatatgatccctgggtgggttcccagaggggttcatgttccctgagggtcacacggggaggcaggatttgactccgggacggcctgattcccccacaggccagcggagcctgcaccaccgtggagacaacctggagaccctggtcctcctgaacccatcagacaagtccctgtatgatgaggtagggaatggctgacgtcctggagggggcgggctgctgggacccgtgccttctctgtcttcctgtctcgtgtccttgtcttcatgctgccccagatcctctcaagacacccggcaccacacttcttcgcccacgaagccttccctgtggcttcagcctccgcttcttccctcctctggggtgggagcagaaaagcctggactttgggagggaggggagggtaagcactcccagctcagggcccaggacagcgtgggtctggaggtgggaaggccagagcagacaggttttcctcctgtgggttccctccggctaggccccaggagttgtctgaatcgactcactaacattaaccagcttgtggccatctgtactctaccaattatacatccggaagatgaaccagacagagccctggggcatcccactacagaccttcttacaggttgattccttggatcaacttttcccttttgttcccttgaggggctctcagtctttaagagacagagtgagacacagacacccccagccctgtggcatcagggctgggctggagggagaggtggactagagagagcccagaaagggcaagtagtgccttcaggaggaagggacatcagagctgggctttgtaggatgaataggagtttgctagggttgctccagggcccagcaggagacctggagactgccttcgtagctagttgagcactgggctggtcgtggggtgaggacaggagaggggtggttatgtatcgactcgaggctaccccaaagaggactgctggatacgtcactgcacagaacgggtcctttagtgttcaccccctccctcagctccggaaccttctgttggaccctgcctctcacaagctactggtgttggctgggccctgcctggaggagacgggggagctgctgctacagacagggggcttctcgcctcaccacttcctccaggtcctgaaggacagagaggtaagccacccctttgccatcccctgcttccccagctctgaatcctgactggggtgtatcaggctgtgtggcaccagcgacctgctgttttccatggcctggtctccccatcctctgtaggatggcagtggtgacacatgcctcctggctgtctggggtcagtcccattgcccgcgaaagggtgtggtgtgagctgagtttgtaggtcagcagatgtcccaaagtcctgatgagggatggagccaaatgggtccttcctggtgcccgcagtctgggtaggacacatgggcaaaatggcaaacctcactttcacattgtagtggggcacttaaaaatggtgagaaaaggttcagtagacaggtggggcgtggagagtctccttggagggagctgtgccctgggaggagagaatggtgagtgtaaaggccctggggcagggaggcatttgaaggggagggagagacaggaggtgaggccagatcaaagagccttgtggcgctggagagggttgggttttggcgggagggccctgaggagcaggccctgggggaaaggatgagggtgtcctcgcccagttttcccaccgggctaggtgttgcctggctctaggtggtcccttaccactcctcctccatacagatccgggacatcctggccaccacgcccccacctgtgcagccgcccatactcaccatcacctgccccaccttcggtgactgggctcagctggcacccgctgtgcctggccttcagggggcgctccggctccagctgcggctgaaccccccggcgcagctgcccaactctgagggcctgtgcgaattcctggagtacgtggctgagtctctggagccaccgtcccccttcgagctgctggagcccccgacctccgggggcttcctcaggctgggccggccctgctgctacatcttccctggaggcctcggggatgccgccttcttcgccgtcaatggcttcactgtgctggtcaacggtggctcaaaccccaagtccagtttctggaagctggtgcggcacctggaccgcgtggatgccgtgctggtgacccaccctggcgccgacagcctccccggcctcaacagcctgctgcggcgcaaactggcggagcgctccgaggtggctgctggtgggggctcctgggacgacaggctgcgcaggctcatctcccccaacctgggggtcgtgttcttcaacgcctgcgaggccgcgtcgcggctggcgcgcggcgaggatgaggcggagctggcgctgagcctcctggcgcagctgggcatcacgcctctgccactcagccgcggccccgtgccagccaaacccaccgtgctcttcgagaagatgggcgtgggccggctggacatgtatgtgctgcacccgccctccgccggcgccgagcgcacgctggcctctgtgtgcgccctgctggtgtggcaccccgccggccccggcgagaaggtggtgcgcgtgctgttccccggttgcaccccgcccgcctgcctcctggacggcctggtccgcctgcagcacttgaggttcctgcgagagcccgtggtgacgccccaggacctggaggggccggggcgagccgagagcaaagagagcgtgggctcccgggacagctcgaagagagagggcctcctggccacccaccctagacctggccaggagcgccctggggtggcccgcaaggagccagcacgggctgaggccccacgcaagactgagaaagaagccaagaccccccgggagttgaagaaagaccccaaaccgagtgtctcccggacccagccgcgggaggtgcgccgggcagcctcttctgtgcccaacctcaagaagacgaatgcccaggcggcacccaagccccgcaaagcgcccagcacgtcccactctggcttcccgccggtggcaaatggaccccgcagcccgcccagcctccgatgtggagaagccagcccccccagtgcagcctgcggctctccggcctcccagctggtggccacgcccagcctggagctggggccgatcccagccggggaggagaaggcactggagctgcctttggccgccagctcaatcccaaggccacgcacaccctcccctgagtcccaccggagccccgcagagggcagcgagcggctgtcgctgagcccactgcggggcggggaggccgggccagacgcctcacccacagtgaccacacccacggtgaccacgccctcactacccgcagaggtgggctccccgcactcgaccgaggtggacgagtccctgtcggtgtcctttgagcaggtgctgccgccatccgcccccaccagtgaggctgggctgagcctcccgctgcgtggcccccgggcgcggcgctcggcttccccacacgatgtggacctgtgcctggtgtcaccctgtgaatttgagcatcgcaaggcggtgccaatggcaccggcacctgcgtcccccggcagctcgaatgacagcagtgcccggtcacaggaacgggcaggtgggctgggggccgaggagacgccacccacatcggtcagcgagtccctgcccaccctgtctgactcggatcccgtgcccctggcccccggtgcggcagactcagacgaagacacagagggctttggagtccctcgccacgaccctttgcctgaccccctcaaggtccccccaccactgcctgacccatccagcatctgcatggtggaccccgagatgctgccccccaagacagcacggcaaacggagaacgtcagccgcacccggaagcccctggcccgccccaactcacgcgctgccgcccccaaagccactccagtggctgctgccaaaaccaaggggcttgctggtggggaccgtgccagccgaccactcagtgcccggagtgagcccagtgagaagggaggccgggcacccctgtccagaaagtcctcaacccccaagactgccactcgaggcccgtcgggtgagtactggagctggggccctgggctgggttagcagctgcttaggctggagagcatagctcgtccccctgtttttacattttcagtttttttaaaagagatggtctcactctgtctctgagctggagtgcagtggtgtggtcacagctcattgcagccttgaacaatggggctcaagccaccctcccacctcagcctctccagtagctgggactactggcaccgccactacccctgcctaattttaaagtttttggtagagatagggtcttactatgttgcctgggctgatttcaaactcctggcctcaagctgtgtgcccacctcagcctcccaaagtgttgggatgactggcgtgagccacggtgccctgccagttctgttcttttttttttttttgagacagaatttcgttcttgttgcccaggcaagaatgcaatggcacgatcttggctgactgcaacctctgactcccgggttcaaacaattctcctgtctcagcctcccgagtaggtgggattacaggtgcctgccaccacgcctggctaatttttgtatttttagtagagttggggtttcaccatgttggccaggctggtctcgaactccggacctcaggtgatctgcccaccttggcctcccaaagtgctgggattacaggcatgagccactgcacccagccaagtcctcctgttcgtaattacttcgtgacctcagccgtgcccacctctccggggctcagtttctcctgtgaaatggaaactgacctcagtgttgaagcacttgccattctgaggtgcctggacaggtgagcacgtatgccaactgtgggtttctagaagccacaataagtaaaatgaaacagttgaaaatttaaatagcgtattttatgtaactgattggttaggaggacccggcctatggttgcactcatagcagagcaaaatcagcaaagagaaaaggcacatagggtgaagtccaaaggaaaccaggcagaagcttccagaatcctctcccagtggggctgcacaccacaggcttcatttctccagtagcaagttgtaacagtgtgtccctcatggaagctcattagacacagcatgcccaggtttcctattgggccattacataggcatcttctgcctggcacccacactctagactccccaaaaaggagaaatcaggtgtgtggtccagtccaggcacagggagcccctctcagacagggaatggtgggaaccctctgcctaagatccaaattcccagagaccagccaaaggctcacattttaagcaggccttgctgagaggagggtctctggcctgctgtgctgttctttgttttttttctgagacagagtctcactctgtcatccaggctggagtgcagtggcgcaaacatggctcactgcagcctcgacctcctgggttcaagcaaccctcccacctcaacctcccgaacaggtgggaccacagacacgcaccataacggccagctaatttttttttgagatggagtcttgctctgtcaccaggctggagtgcagtggtgcgatctgagctcactgcaacctctacctcccggggtcaagcgattctcctacctcagcctcccaagtagctgagattacaggcatgcgcaaccatgcccagctaatttttgtatttttagtagagatggggtttcaccatgctggtcaggccggtctcgaactcctggcctcgtgatctgcccgcctcggcctcccaaagtactgggattacagacgtgagccactgtgcccagcctacgcccagctaattttaaaatttttcagtagcactggggtctcactatgttgccctggctggtcttgaactcctgaactcaagtgatcctttggcctcggcctcccaaagtgctgggattataggcataagccaccacgcccgactcaacgtttaattttggatgaaccgccagactgttttccacagcagctgcttgacgctagccagtctaatgggtgtgaggtgggatctcattgtggttttgatttccatgtccctaatgattagtgatgttgcatcttttcatatgcctattggccatttgtctgtcttctttggagaaatgtctattcaattcctttgctcattttaaaattttgttttactttttagagacagggtctcggtctgttacccatgctggagtgtagtgcaaacacagctcattatagcctcaacttcctgggctcaagtgatcctcccagctcagcctcccaagtagctgggactacacaggtgcatgccatcgtgcctggccaattgtttaatgttttgtagagatggagtctcactatgttgcccaggctgatcttgaactcccagcctcaagcgattctctcgccttggcctcccaaactgttgggattacaggcatgagccaccatacctagccccctttgcccatttttaaattgagttgttttccgttgctgagttttaggagttttttaaatcattctggacattaatcctttagcagataaatggcttgcaaatatttcctcccattctgtgagctgcctttttattcttttgatagtgccctttgatgcacaaaagttttaaattctcatgaagtccattttgtctatttttttcttttgttgtctgcacttttgatgtcagacccaataaatgattgccacatcgattttttttcttttttctttttcttttttttttttttcagatgagtctggctctgttgcccaggctgcagcatgggagcactatcttggctcactgcaacctccgcctcccgggttcaagcgattctcctgcctcagccttcctgagtagctgcgattacaggcacccaccaccacacctggctaattttttttgtgtttttagtagacacggggtttcaccacgttggccaggctggtttcaaactcctgacctcaagtgatctgcccgcctcggcctcccagagtactaagattatagatgtgagtcaccatgcctggtcaaatccaacagtgagaagcttctaccccatgttttcttccaggagttttaagttttccatttcacatttaggtccatttggaggtaatttttgtatgtggtgaaaagatccagtgtcattctcttgcatgtggaagcccagctttcccagcaccatttgttgaaaagactatcctttccccattgaatgtttggaacgcttgttgaagatcatttcagcatacatgtgatgatttatttccgggcctctattgtattccattggtctatatgtctgtctttatgccagtgccacgctgttttgattactgtagctttgtagtaagttttgaaatctggaagtgtgagtcctctatcttgattcttctatttcatgattgtttaatctccttttcacattgttcattgttcatgtatagaaattcaactgtgttttgcctgtggactttgtaccttgcttctttgctgaattcgtttattattattttttgagatggagtctcactctgtcgcccaggctggagtgcagtggcacaatctcagctcactgcaacctccacttcctgggttcaagcagttctcctgcctctgcctcccgagtagctgggattacaggcacctgccaccacgcccagctaatttttgtatttttagtaagagacagggtttcgccatgttggctaggctggtcttgaactcctgacctcaagtgatctgcctgcctcagcctcccaaagtgctgggattacaggcgtgagccactgcacccccaggcctgattttttacattattgttcataaagtctgttgaactggcattttcttgtagaattaaatatctgtgcctggctttggtattaagacaattctggtcttataaaatgagttaggaagtgttccttcctcttcagttcctcggaaaagtttgagaaaggctgatgttagttctctaaatgtttagtggcttccccagggcttttctttgttgggaggtcgtaagttactgattcattctccttgctagctacaggtatgtgctgattttctatttttgtgattgtgtcttggtagtttttgtgtttctaggaatgtgtccatttcggctgagggtatgcatttgttggtatacagacggggtagtactcttaccccctgagctgggcagcagctgtgattgtaagatgcagggtctggcaggcttcttgtgcccgagacccagccgtatcctttcatttcattgatcattcacttgcccagggctggtggccttgtcccctttggccctaaggtcagggtttggacaaggcccccagagctgctgtctcatccgcatccagcatcccgcagtgatcttgggcccgcctctcaaggctctgtccacccaccctggctccccatcacccttggggcagggattctgtctgtcttggtcacagccctgtttcagggcctggtgcccatgaggttctgttaaatgccccttgagcaagtgaaccagacaaatgctgcagaagcagcagatggtccaggcactggctgctttcagggctcaaactcttaaaccctcttccaggaagcattccctgattgccacccactcgccccccagccctggggatgtctatgtccagggactggctggggatgagtcaggctctaggcacaaaggggtggccggtggtgtttgtagagtgagtgaagagtcactggagtcaaggcgtggtgacatgcacctgtagtcccatctacttggaaggctgaggcaggaggatcacttgagcccaggagtttgtgacgagcctgggcagcatagcgagaccccatttcttaaaataagattcactggagtcatgagcgcaccaggcctccccagaaaactctgagttcaggcctcctgctgaggagggagctgctctgagtggtgcaggtcgaacttggagcctcggcccctccccagccccaggagctcatccctgcctccccatccccccgcccgcagggtcagccagcagccggcccggggtgtcagccaccccacccaagtccccggtctacctggacctggcctacctgcccagcgggagcagcgcccacctggtggatgaggagttcttccagcgcgtgcgcgcgctctgctacgtcatcagtggccaggaccagcgcaaggaggaaggcatgcgggccgtcctggacgcgctactggccagcaagcagcattgggaccgtgacctgcaggtgcgtgtcaccccagggcctctggtggtaagtgtagttagcacagatgggtaaaaccaccctcgaccctcagagactaagctgtgttccccaggccacacgggaatgggggcgaatgtgggagtctcacatggctcagcccttaggggtctcttcggactctgattctgtcgtgtcactgttgtcattggctgtgctggaagcctgggggaggacgcagggcctcgtgaagcctcatggttctatcccttccccagacaccttgtcacttagccattgttccgctgtgagaattagtcgggatggaataggtgggctgggtggtatctgtgcggctgagaaccctcccccatggctgcatgaagctgagagactgaaaccaagccctgcagggcgaggtgcatgtgggcagagggaggaccgcctcacaccgcggcccctgccctctcatagctgctaggctggcttcaaaggagtgtccctgtagggtgcacgacccaggaaaaggcccagaggtaggaaagaggttggtgtgttcaaggagcagggggagatccaagtgagtagagaggggtctcaggccaaggaaggccttgcagaggaggagctccgtctcctgtgtgctgagaaggctctttgggtgctggttgggaggaacagggacctcacagacgggctgaccacccattgcagacctcaaggtggagcacacaagatcagggaaaagccaggaggggtctcaaatgccaggaaaggaaggcgacttgggcccaggccagaagggcagggggcacccccctcactggtggtccactctccccacacaccccccctccacctgcaggtgaccctgatccccactttcgactcggtggccatgcatacgtggtacgcagagacgcacgcccggcaccaggcgctgggcatcacggtgttgggcagcaacagcatggtgtccatgcaggatgacgccttcccggcctgcaaggtggagttctagccccatcgccgacacgccccccactcagcccagcccgcctgtccctagattcagccacatcagaaataaactgtgactacacttggctgtggcctctcttctttctgtgatgggagacttggcatgtacctcctggtcctgcgggtggggacagcttccatggaatccccagtgaccctgcggtcaggcccactctggcctccatgtcgcagatgggagaaatgcaggcttcgctgggcctggtttggggaaggaagtgcctctcagagttaatgaccactgaccggtggagctcctgactatggcctccatcccgactcagcaactgtgaggggcccaagttataggcgcgaagtagctacctgactatctgtcacacaaaccagttggtggcagggggagattgaatacctgtctctgctccaaagccatcaaacaaaagctatcctgctgtccctagaggagatggatgcttattccagaaagtcttactctgcaggaaggatttacagaggaatctgaaacccagagattacagaatatccacttctgactaatgcaccctgacccctctctgcagaaatacaagcacttaggtttactattagatacaatgtcatctgtactgggttgaatggcagccagcccccaaaacacattcaacacctgacccctgacacctgtgaatgtgatgttattttgaaaaaggatctttgcagatacagttttattattttttgagatggagtcttgctctgtcacccacgctggagtgcagtggggcgatcttggctcactgcaacccccgcctcctagattcaagcgattcttgtgcctcagcctctctagtagctgggattacaggcacacgccaccacgcccggctaatttttgtatttttagtagagacggggtttcaccaggttggccaggctggtctcgaactcctgacctcagatgatccacccgcctcggtctcccgaagtgctggattacaggtgtgagccaccatatgcctggcccttcacagggtcttacggtcacagggtaggtgatcaggaagggcaggtggagcagaggagccatgcctgtgcctgccacctcctgtccaatgcctgctagcaatgccaagatcgctaagctcagccagccacctcccacttccacctacccaccctccacacctctgcagcggaaacttaacagggatgggagtcctgggagaaaggccccagcctaggcgagttgacacagcagtgcaaagccagccctgcccagttccccatcagctggcactcaagttatggccttttctccgttgccagggtaaggatggacctcttctggggtcaccatttatacatgaggatgattcccctgggtttcttgttttggccaaactgtctagtgacccctgctgcctacttgttcttatttcaattgtcccgttatcagggaggtttctttctatttatgggctctttcttttttttttttttttgagacagtttctctctcttgtccaggctggagtgcaatggtgcaatctcagctcacagcaacctcaggctccgaggttcaagcaattctcgtgcctcaggctcccgagtagctgggattaccggcatgttccaccatgcccggctaatttttgtatttttagtagaaatggggttttgccatgttgaccaagctggtctcaaactcccggcctcaagtgatccacccacttcagcctcccaaagtactgggattccaggcatgagccaccgtgcccagcccaggcctttttccttctttctcttgagacagggtctcgctcagtcacctagatgactgcagtggcacaatgtcggctcactgcaacctctgcctcctgggcttaagtgatcctcccacctcagcctcctgagtagctgggactgcctggctaattttttgtatttttggtagagccggggttttgccatgttggccaggctggtcttgaactcctaacctcaggtgatccacccactttggcctcccaaagtgctaggattacaggcatgagccactgggcccagccctttttttttcttttgagacagggcctcactgttgcccaggctggagggcagtggcatgatcatgtctcattgcagcctcgacctcccagactcaagtgatcctccgaccttggcctcccaagtaagtaggaccacaggtgtgcgtcaccacacccgcctaatttcttttattatttgtagagatgagatctcactatgttgcccaggctgatcatgaactcctgggctcaagcgatcctacttcggcctcccaaagtgctgggatttacaggcgtgagccactgtgcctggcttacaggcctttttctaattagctggtttgatatttttctcattgggtatttgtctttttctcattcctacacaattttcttttttaaattagggataataaacttatgtggtaaatgttttccaaatgtacttttccattttgtttaggcatgattttgctgtagagatatatatatttttttgatggtctctcgttgcccaggctggagtgcagtgggtgggatcacagtcactgcagcctggaacttctagcttcaagtgatcctcccacctcagcctcccaaagtgctggaattacaggcatgagccactgcacctggccaaactgcaactttttttttaaaacggagtcttgctctgtcacccaggctggagtgcagtggcgcgatcttggctcactgcaagctctgcctcccgggttcacgccattctcctgcctcagcctcccgagtagctgggactacaggcgcctgccaccacgcccagctaactttttttttgtaattttagtagagatggtgtttctgtctctattaagatgaggagagtacatagaacttgccagtcatttcaacaaatgttgtaaatggacagaaatctctagttaaaaggcaaaaggtggctgggcacggtggttcatgcctgtaatcccagcactttgggaggctgaggtgggcagatcacttgaggtcaggatttcgagacccccaacttgggcaatgtagtgaaaccccatctccactaaaaatacaaaaattagccaggcatggtggcacatgcctgtaatcccagctactcaggaggaggctgaggcaggagaatcacttaaacctgggaggaaggacgttgcagtgaggcgatcgtgccactgcattccaacctgggcgacagagcaagactctgaaaaaaaaaaaaaaaaaaaaaaaaagccaaagaataaactttgttggtattgtaagccatatagtctgtccagaccactgaattcctttgttgtaggctgaacagactacaacaaatgggtgtggtataaacatagaaccagtccaatctggttcagctttgttagtaacaaaatgtaacaaaatgatgagtcgtttttcagtgcaatggacccccagggtgcaagtcacatatcgctggagcattaacagatgaacaaagcatgcccaattcataacccttgggtggaatgaaaaagtcaactacaggtagaacccaagtactcggatcaaggaatggggactatgctgggcgtggtgactcatgcctgtaatcccagcactttgggaggcccaggcagacggatcacctgaggtcaggagttcgagcctggccaacatggtgaaaccgtctctactaaaaatacaaaagaaactaacggggcatggtggtgcgcacctgtaatcccagctactcaggaggctgaggcagggagagttgcttgaacccaggaagtagagattgcagtgagctgagatcccaccgtcactgagatccagcctgggtgacagagcgaggctccatctcaaaaaaaaaaaaaggaatggggaccaaattaaaaagagaaagctgggtgtggtgtctcatgcccaggaattggagactagcctgggcaacatagtgagaccccgtctacaaaagatacaaaaattagctgtgtgttgtaacatacgcctgtagtcccagctacttgggaggctggggtgggaagatcacttgagcttccggaggttgaggctacagatagctgtgatttcgccattgcactctagcctgggcaacagagcaagaccctgtctcaaaaaataaaagggggagggcggtgccttgtttactgcagtgtggacttgagcaccaaaaacacatcatcgcccctgcacgtgatgcagtcatatcacccccattgcatttccgtatctctcccatgataaccctctgcctatgaaacctgcccccaagctccagcttgaagagacagatttgaacttcgcctactgtctccttgccagttgactctcaaaaaagctttttaggccaggtgcagtggctcatgcctgtaatcccagcactttgggaggccgaggcagacgcatcacttgaggtcaggagttcaagatcagcctggccaacatggagaaaccccatctctactaaaaatacaaaaattagccaggtgtgctggtgcacgtcttgtaatcccagctactctgtggcagaagaattgcttgaacctgggaggcagaggttgcagtaagctgagatcgcaccactgcactccagcctgggcaacagagcaagattctgtctcaaaacaaaataaaaacaaaaactgttggaagttcctcccactgggcaaacagtgtcaggtgggcgagtgaaacacaaagaagcaacagcccatggtgtgaggtgtggggaggtggcacgcgcaccccgagggctcagaggaagccttttagcgctgccgccttgggggttaaaggaggcttcccaaggatgcaaaagggtgagccttattagggaaggggaagggtgctcctggaggagggaccggcagaggcaaaggcctggtttgctggaggaactgagagaagggtgacattgacgcccccgcaaagggggaagagtgtgggaggcagctgcctggaggcctcactgagcagctgggaccaaatcccatggggccctgggggaggggagacgcaggggaagcgggcttaaagtggacttgggagaggcccgccagtggaagaggggtgggggtgggggtgccaggtcctggtggggcgtggccagagctcatttctgggaagatgtcagctcttcccagagagaggcagtgatggggcagggcgtggtggagccctgcctggtatggtacctcctccaggtagccctccttgctacctcttagtccactgcctggacccttcctgactccctctcttaaaagtgtcctggccaggcatggtggcttacgcctgtcatcccagcactttgggaagctgaggcaggcggatcaccagaagtcgggagtttgagaacagcctggccaacatagtcacaccccgtctctactaaaaatacaaaaattagggccggatgcagtgtctcactcctgtcatcctagcgctttgggagggtgaggtgggtggctcacctgaggtcaggagttcgagaccagcctgaccaacctggttagcggggcgtggtggcacacgcctgtaatcccagctactctggagcctgaggcaggagaatcacttgaacccgggaggcagaggttgcagttacccgagatcgcgtcactgcactccagcctgggcgacaaaagcaaaactccgtctcaaaaaaaaaaaaaaaaaattattcgggcgtggtggtgggtgcctgtaatcccagctactcgagaggataaggcaggagaatcgcttgaacctgggaggtgaaggttgcagtgagctgagatggcctgggcaacaaagtgagactgtctcaaaataaataaataaggccgggcgcagcggctcaacgcctgtaatcttagcactttgggaacacctgaggtcaggagtttgagaccagcctggccaacatggtgaaaccccgtctctactaaaaatacaaaaactagctggacgtggtggcgggcgcttgtaatgccagctactcaggggactgaggcaggagaatcacttgaactcgggagatggaggttgcagtgagccgagatcgcaccattgcactccaggctgggggacaaaagcgagacttcatctcaaaataaataaataaataaataaataaataaataaataaataaataaagtgtcgtcctgtccaccagcacatcttcctgttgtatttccttttaatccatagccctagcagactcttacttgtttatatgtttatatgtcaatatgtttatattgattcccccaactgtgagcccatgagagctgcaccctctccatcttggttgtttctgggtgcccgctgcccaggacaggacccagtacctgtacccacacaccaggttcttgggaaatgttggttgtgccccagcttggcagcactgctgggtgacctcgggaatgttccttaacctctctgggcttctcctcttccccagtctcagaaataagaaagttggcctgaacctccaggaagagcagggagccttgggctgttttggcaactggacccctgagttttcttccctggcctgttcggccccaggcactccagacaggcctgacctatgtcatcctgtcctccccaccccctacagcatcctttgggatctgggcccagggcaggtgtgagctgtggtaccagcacacccatgtcaagtcctgcctctgacgtgtgtttgctgtgtgacttccaagagtagcttgctttctctgagctctgtttcccctggcccaggcttgggagtggagtgtctgggggagtgtggatgcagttcagacctcacctgacaggtgtggatagtaccagggccagggcccccaagaagctcccaggctggagggggagggggcaatgcctaacataacatcccagtcctgggggatcagcactggcttggaaggaaaaccagatgggttttcaggagcctgggaagctagctggagggcttcttgaaggagaggaccacataggaactaagagctaaaggtgggaaggaaatctgggatgccagaaggaggacttcctggaggaggggaccacataggaactaagagctaaaggtgggacgggagcctgggaggccagaaggagggcttcctggaggaggggaccacaagagctaaaggtgggaaaggagcctgggaggccagatggagggcttcctggaggaagggaccataagagctaaagttgggaaaggagcctgggaggccagatggagggcttcctggaggaggggaccaaacaggaactaagagctcaaggtaggaaagttaccagtcagatgcaccctgaggtggaacggcttttgtgccccctgcattgaggtgggtagagagaggtgaggacaggaatgtagggagggccggaccccataagcatgatgggctgctgagacaggtttgcagtttttaccaagagtgctggggagtctggggagtgtttcaagctggagaaaaaggtgagcagtttctgtttgaaaccccactgtgggtcccagttaaacattctggaattgctacacacatgcacttcaatggaacagctgagcacgtgaaggtgataggacaggcaagcctcaaaattggggcttagtctgagagggttcttggcttcacccaggaaggaatttgagggcaagtcaattgtgttaaacagcaacttttctttttcttttttcctttcttttttttttaagatagggtctcactctcatgcccatgttggagtgcagtgccatgatcttggctcattgcagcctccaggagtcctcccacctcagcctcctgagaagcttggaccacaggcacagtccaccatgcccacctaattttttttttgagatggggtcgtcttgctctgtcacccaggctggagtgcagtggcatgatctccgctcactgctccctctgcctcctgggctcaagggatcctcccacctcagcctcccaagtagctgggtctacaggcacaagccatggagcccagctaattttttgtatttttggcacaggcagggtttcaccattttgcccaggctggtctcaaactcctgagctcacgtgatcttcccacctgggcctcacaaagtgccaggattgcaggtttgagccaccgcacctggcctaatttttgtattttttttttttttttttttttgtagagatggggttcggccatgttgcccaggctggtaaacagcaacattttcttcttcttctttttttctgagatggagtttagctcttggagtgtgatggcatgatcttggctcactgcaacctctgcctcctgggttcaagcaattctcctgcctcatccttccaagtagctgggattacaggtgcctgcccccacacccagctaatttttttgttcttagtagagatggggcttcatcatattggccagaatggtcttgaactcctgacctcaggtgatccgcccatctcagcctcccaaagtgctgggattataggtgtgagccaccatgcctggccttttctttctttctttttttttttttttagacagggtctcgccttgtcacccagactggagtgcagtggcaccatctcggctcattacaacctccacctcccagtatcaagtaaatctcgtgcctcagcctctccagtagctgggactacaggtgcccaccgccaggtctggtctggctttttttttttttttttttttgagacagagtctcgctgttgcccaggctggagtgcagtggtgtgatgatagctcactgcagcctccaactccctgactcaagcaatcctccagcctcagcctcccgaatagctgggattataggcatgagccaccatgcccagctaatttctgtatttttagtacagacagggtttctccatgttggccaggctggtctcgaactcttgacctcaggtgatccacccatttcagcctcccaaagtgctgggattacaccgcgcttggccctaaacagcggcatttactgaaatggccgtgtagagcagcatcagaggtgctgttccttgctgagcaagaccactgtgcataggcagtccatccagaatagtagctcacaggcacagctgcactcatatgtatacccacttttaattatatgcaaatgaaggccaggcgtggtggctcaagtctgtaatcccagcgctttgagaggctgaggcgggtgggtcacctaaggtcaggagtttgagaccagcctggccaacatggtgaaaccccgtgtctactaaaaatacaaaaattagccaggcatggtggtgtgcgcctgtaatcccagctactcaggaggctgagacaggagaatcgcttgaacccaggaggcagaggttgcggtgcgctgagattatgccactgcactccagcctgggcaacagagcaagataccatctcaaaaaaaaaaaaaaaaaaaaaaaaaaaaaatatatatatatatatatatatatatatatgtatatatatgcaaattaaggggcagtgtatgcagaaacttccaggaaaagggtgacaacttctgagtcatcagggttgttgccatggaaaagggtggtaacttctgcatgttgtcatggcaatggtaaactgacatggcacaccagtgggcatgtcttaaggaaagccccttccctgggggtctgttttataatagctagtcctcaatttggtccaatgtcgcagccccacctctggagttgagtcctgcctcctactttggagggctgacagtgggagccaggtttctcagggataaagtagaagatcacagacaggcaaggggaggaggctgagctcatgttcaacccaatatagatagttacagcaaaatatgtacagatatgtgtatatacatatatacacacatacagctccctgctctgtctgcagacagggcctccaagacacgtcaccccagtaacaagtacacattggccgggtgtggtggtttatgcctgtgatcccagtacattgggaggccgaggcaggaggataacctgaggtcatgagttcacgaccagcctggccaatatggtgaaaccccgtctctgctaaaaatataaaacttagctgggtgtggtcgtgggcgcctgtaatcccagctactaaggaggctgaggcaggagaattgcttgaacctgggaagcggaggttgttgcagtgagccgagatcacgcaactgcactccagcctggcaacagagcgagactctgtctcaagaaaacaaagaaacaaaaaacaaacaaacaaaacaaaaactaaaaaaagcccccaaacctgacagatgccattcggccaggaaatcaaggtcaacaccagcagagtaagtcatgttgacagtttgtacctttgatatggtgtgatgagatgggtgcttcacctctgtggtcttccttccccaaatccattaccctcatttaactgtgagaaagacatcagagaaacctcaatggagggacattctgtagaacacctgaccaccattcctcaaaactgtccccgaaaacaagacagtttgacaaaccgtcacaccccagaacagcctaaggagacatgaggagtaagtgtcatgtaagattctaggacagaaaaaagacattgcaaccaatggccataccagtggaaggtgataatcatgtgggaggcgggccgggcgcactggcccactcctgtaatcccagcaccttggaaggccgaggcaggcagatcacctgaggtcaggagtttgagaccagcctggccaacatgacgaaaccccatttctactaaaaatacaaaaattagctgggtgtggtggtgggtgcctgtaatcccagctactcggaaggctgaggcaggagaattgcttgaacctgggaggcggaggttgcagtgagccgagatagtgccattgcactccagcctggccaacagtgagactctgtctcaaaaaaaaaaaaaagaaaaagaaaaagaaaaaggaaaaagacactgtaacaaatggacataccaatggaaggcgttaatcacgggggaagcaggccaggtacagtggctcacgcctataatcccagcactttgggaggatgagcggggaggatggagtgagctcaggagttcaagaccagcctaggcaacatggtgaaactccgtctgtacaaaaaaatacaaaaattagctggacgtggtggtgcgtgcctgtaatcccggctacttgggacactgaggtgggaggattgcttgagcccgggaggcagagcttgcagtgagctgagatggcactactgcacttcagcctaggtgacaagagcaagaccccgtctcaccaaataaataaattaataataataataataataggccgggtgcagtggcttacacctgtaatcccaacactttgggaggccgaggtgggcggatcatgaggtcaggagatcaagaccatcctggctaacacggtgaaaccccgtctctactaaaaatacaaaaaattagccgggtgtggtggcgggtgcctgtagtcccagctacttgggaggctgagaatggcgtgaacctgggaggcagagcttgcagtgagccaagatcatgccactgcactccagcctgggtgacagagcgagactctgtctcaaataataataataataataataataatagaccaggcacagtggctcatgactgttaatcccagcactttgggtggctgaggtgggaggattgctttagcccgggggtttgataccagcctgggcaacatagggacaccctgtctctattaaaaaaaaaaaattaaagaaaaaaataataggagaagctgggtgttgggtatacaggaactctctgtactctcttcacaataattctaaaactgctctaaaataaaaggtttatttggaaataaaaggaactggccagtttcagtgcttcacgcctgttgtcccagcattttggaaggctgaggtagggggatcgcttcagcctgggagtttgaggctgcagtgagctatgatcacaccactgcactccagcctgggcaactgagcaagacctcgtctctaaacaaagaaagaaagaaaagaaagaacaactacagttgccttggagaatagggattgtctagggctgggatggagggaacaagaaacacaaataagaaaccgagttggcatccaggctgaagacaattgggtcttcgctgggaccactatggggtgtaggaaaatggacaatttggaactgtttcagagacactgaatccacgggatgaaatgctggtaatgaagggaagagaagatccttagggcctcccaagcttctggtctgtgctcctgggctgccctgactgagcctgggaggctggtggaggggcaagaaaatcagccgggtgccctgtccctaagcagagggtaggatgggggactggcgggtgttgtgtaagtttatattttctttttctttgtttttgtttgtttgtttgtttgttttttaagacgaagtctcactcttgtcgcccaggctggagtgcagtgatgtgatctcggctcactgcaacctccgcctctcggattcaagtgattctcctgcctcggcctcccaagtagctgagattacaggcgcctgccaccatgcccagctaatttttgtatttttagtagagacagggtttcaccatgttggtcaggctggtctcgaactcctaacctcaagcgatcgagttcgaactccaaaaaagaactatcatatggcatatgaggggatgacctcctctgcaaggtgccggatcccggggctgccctaggccggctgcagacttgctgtgtggcctccaagcaagatcttgccctctctgagcctcagatttcccatttgtaaaataaagaccaataatgtccaggttacaggcttgtggggggtcatcaactgagccctgcctgttcgctcaataaacgttggtcgctccttactccttaccactgagtctcagggcgaaagagtggcgcctgtctctttaaattatgcaaatagactgcgggtggcgtaagggggggaacataaaaaggagcctagtcttcggctggaccaatcagcgcgctgagctggcggagctgggcgcctaaatggcccaatggggggccgcgcgggatcagagcccgccctgcctcctggcgccgtcgcgggggtggggactttctaggccacgccccgggggcggagcccgccggcagccgcgccgcagccgcggagggaggggcggggcgggctccggtgtcagcgaccaagccgcaggtggcggcgagcgcggggctcggcccgagctcaggaggtgagtgttgccccccggaaccccctgggataccctggcccgcgcagcctcccacgcgcaccgtgccctgcagccccggcggctgcggagggcaaaggcgcggcgggacgcgagggatggagagcagggggttggggctacgcggtgggcgccccggcttccccctccaagtggtaattgggggtccgcaggcgaaaatggggaccgctccccaaatcccccgtctcctggcctagaaccgagcgtgcacgggggcggcgacgacgcgagacccctccccaaattcttttattctaagcctaggtctgggttctggggctgcaaagatgggggcgccgctccccttccagcctggaaccctgggcggtggctgagatggggaccacccgcagattccctcttcccagctccggcctgcagaccaccggggaccgagacgagggaccccttcccttttcctccactgtgaacccctatccaggcctggtggctggaggagctggggtgtcacctggcccctcctctaatctgccccatcccagtcctccaccttaaggatggggtggggggcgtttcactggcatcttctgtggggaccccaaggttggaattttggggaggaggtcactgtggggtcccctgcctggcacggtttatccaggccaggccttgaagggcctggagcctggacttggggggggggtccctcttttactgaggggcggggtgtacagctagcatctgtttctggggattaaaataaatcgaggtaaattaggatcttgccagaggctggctgtgagtggggtgcggaggaggcttggggggtgggggacccctccatctgccttggatcccccgagtcacctgccccagctgcactggggaccaggaggcagtgtcgaatggacctgcttcactggtgaccttgggcaggtgacagcacctttctgaacctcggtttcctcttttgaaaattgaggttgggagcttcggaccctgcattttacagattctgaactcacccagcccacattttgtccaatggtgattcactcttttgcttaacatgtgggtggtttggggtcaagacagcattgggtttggagaccctcccacagtgccttgctatcctctcagcctcagtttactgcactgcaaaatgggttgatgatgacactctgatattggggctgagggcatggggacagggagtaaaacataggaccaagctgcaatggctgggatggggcatcgccaccctggtctcaccattggggccacttagggcacaccctgacccacataccatcacccacgccaggggtgaacctgttctcgggcgaggtcctgggcaggagggggtgggagttgccaggccagctcattccctgtcccttggagcgccctcccagtggtgggcatggggctgggagtctgacacccccaggtttgaatttgcctctacctgtgtgtgtgtttttcccttggtgcctttgtttgttcttctgtgaaatgggctgaattcctctgggaagatgggaggagtctgtgggaggaggaagctctgtaaatacagacatgattattataatattaatgacagtattagtgctctttaaatcgggtcacagctgaccaggaggagggaggggaagggggagtctatcaaaggcattgcctgaggagactccagcacctgggaaagttgggtacacagtaggcattcaatagatgtttgccaaatgaagtgaggaagagggaggggacccatggggaggacagaaaatttctgagaatccctggctcagattcccacttggtggcccgagtcactgtgtgacctggggcacgtgtctcagtttccccatcgtggtgctggttgagataagatactgccttgaggtgtggtgacgagaatcaagccagattgtctgtgatcgcagcccaggtggcgaggccaagaggggagacatgacatagtgggtcattgaaacagcatggtacctgcttgaaccaagtgactggtccgtgggaaggatgagaaaacccttgctactggccctactgtacatacactggggtccaagagagagggaaatgtgagatcctgtttcccaggatcctggaagccagatcgtggaaggtcaggagtggcccaaggtcatcaggcaagacgtcagcggctccggacacccagccaggcaccactcgattcccaggatgggagctcgggtcttgcctttgttgctgatgtggttcctgctttgttttatctgttctggggctgctcacatgtctcagccccaggtttgcaagacttggtgccgggaaggcaggatggggacctctgagtcagctggcaatgtgctgtgtaaccttgggcaagtctccggccatctctgggctttgtgctggtactgtacaggctgggagacttgggttctagcagggctgacttctccatcagacccaaaatgcccagtgtctcaggctcacagtgcttttaggggtccctaggttgatgttttcacttcttttaaaatccaaagggaaaaaaatgaactcttgggttgaaggaaacatttttgtgtataatattaatatatttgtctttatgtcaatgtagttgtaaaatacagttttgttttgttttgtttttgagacagagtctctctctgtcacccaggctggagtgcagtggctcgatctccgctcactgcaacctccatctcctgggttcaagcgattctcctgcctcagcctcccgagtagctgggattacaggcatatgccaccccacccagctaacttttgtatttttagtagagacggggttttaccatgttgcccaggctgttctcgcactcctgggctcaagcaatccacctgcctcggcctcccaaagtgctgggattccaggcatcagccaccacctaaaatataattttaaatttcttttgtagtgaaggaaagcgctcatgaatgcaaaaatgtcttcccctttcttttcttttttttttttttttgagatggagtctcgctctgtcgccaggctggagtgcagtggcgcaatctcggctcactgcaacctctggctcactgcaacctccacctcccgggttcaagtgattctcctgcctcagcctcctgagtagctgggactacaggcatgggccaccacgcccagctaatttttgtatttttagtagagacggggtttcaccgtgttggccaggatagtgtcaacctcttgacctcgtgatccacccaccttggcctctcaaagtgctgggattacaggcgtgagccaccgcgcctggccatgtcttcccctttctgagcgcatttccctctctgagcctcagtttgcccagtctgtgaagtgggtatcggcctacctcaggatggcaagatgttgaatgcctgggccagggttggtgctcagttatttcccaattgccatgattaatatttgttcggtaagaacagctccaggttcaggccggggggctccaggttcaagcgcctcttgtttactcacccatggcctgtgtggttccagggaggtcccatgggtgctgatcgggcgggggaggaaaggtggcggttggatggtaggcggggcggggtgagcttcctgtcccccccccaacccatgcacacaagcctccaacttggtgctgacggaagtggcctcgtggctgtctcctggcgcctgccccgtcagacaggggccccatcccactcgctaccctgtccggtgagtttgagccctggccagtagatacccatcatctcgccttggcccccctcaggaacagaggggaggcccccctgcccggagcctgggtttcaggagaagtagcaggtgtcacttcctgggctggccaaagcctgcatggggccacccgttgccctgccccccgtcccccattccagctgtgagtggtggtttgggttaggggggcggcaaggggagcttggaaacccagagagccacgcgtgatggtttcaaacaggaggtcattggcagacagaccaggggcaaaatcacagtcagccgggaccaatgattgatctctctgtgcctcggtttccttcataaagttggggttgcctctgagggcatggcatgaagattggatgagcagatgcgtgtgaatagttgggtacagggtcgcacacatactggtgctccatgtgtatctgtctgccagaggtggggtgaggcaatctaattgaaactgtgaaaacagtagtgagattcttggtttctggggaacttgggctccttggttcctgggatcttctagaacaatgttggccatccaatacagcagccatcagccccatgtagctactgagccttggaagagaggctggcacagctgaggagctgggcatataattgtatgtatgtatgtatgtatgtatgtatgtatttaattattatttttttaagacagaatctcactctttcaaccaggttggagtgcagtggggcaatcttggctcactacaacctccgcctcccaggttcaagtgattctcctgcctcatcctcccaagtagctgggactacaggtgtgtgccaccacgccctgctgatttttatattttttggtagagatggggtttcaccatgttggccaggcaggtctcgaactcctgacctcaagtgatccacccacctcggcctcccaaagtgctgggattacaggcgtgagccactgcgcccagccaattgtatttaattttacttggtttaacattaatacaaaaattaatacaaaaattaaggccaggggttgtggctcatggctgtaatcccagcactttgggggtcccaggcaggaggatggcttgagctcaggagttcgagactggcctgggccacactagtgagacctagtctctacaaaaaaaaaaaaaaaaatttatttttaattagttagacatgtagtcccagctactcgggtggctgagatgggaggatcacttgagcctgggaagtcgaggctgccatgagctgtgatcatgccactgcacactccagcctgggtgacagagcaagaacctgtctccagaaaaaataaaaaaataaaaaaaacttaatacaaaaattattcaggcgtgagcctgtagtctcagctactcgggaggctactattcaaggctcccttgagcctgggaggtggaggctgcagtgagctatgatcgcaccactgcactccagcctgggcaacagagcgagaccctgtctccaaaaaaaaaaaaaattaagtcaccacatggggctagtggttcccatgccagtcagcacagctctaagagatttggagatgcttagggtcctggtcatggacagaagctaagaaatgatatggaaatttagggcttttcccctagggatgtcagtgtagcatgctcaccaccctacccctgccaccaaactaggtttcctaagggggtgtggtggggactgaagtttttcaggggccctgtcattaaccagtgcagggttgggaatgtttgttgaaacaaataattccttgcccagtgaactcctattcatgctttaaaaccccaactcccatgagccctcctttagtccaggttcttttggaccttgtccctccatctggcccagccctgaccatgcaggacggtgatatctgtgtccagctctgtctctctagactggggactcctgcagggccaggcccgaggctgaatcaactcagggaccctgacattgttctagtctgggtgagcaagtaggaggtcttgggtgactcacagaagtcccgggattggaggctcaatgataatgggtccaattaaactaactaactttctttctttttgagacagggtcttactctgtcgcccaggctggagtgcagtggcgccatctcagctcactgcaacctccgcctcccaggttcaagcgattctcctgtctcagcctcccaagtagctgggattacaggtgcccgccaccacacctggctaatttttgtatttttaatagagacagggtttcaccactttggccaggctggtctcaaactcctgacctcaagtgatctgcccgcctcggtcccccaaagtgctgggattacaggcgtgagccaccacttctagcctaaactaactttcaagattaggtaaactgaggcacagagaggggcagccttgcccaaggtcttgctcagtcctttcctggggaggccccgggagcttccccatcctgtggtcacgggtccctgtcactcctgccactgttcctacgaggctcccagctgctaccgagctgcctgtggggtcatgaattatgcatgaggcctgcaggctccagtgacaagcctggcctctagaacatgccaaggacactgcctgtccgtcccctgccgggcggcctgacccagcctcttgtgcagagacacctggggctccccggcaagatcccttctaagcattccttcttattttgcagatggggaaactgaggcacggagctggacagtgactcagacaccaggtgaacactggcttttgagggcagggttgggactcgtgggggcagcaatgccagctgggtcatcacagtgaggagtgagctctgactcccaggagggtacataaggtgaggactgtcctagaggaatcagaagatcccaggggaccctcagggatacttcagggaccccaacccccatgtggctgatcacagcccctgcatctatttctcttcaaacccttttcctgcaggagctgcctggagtggagctgagagctcaggtctgggctcagccagtccagagtgcaaatctactgtcccttcctagctgtgtgatcttggcaagtgacttcccctctgggggaggggagggctcagttttcccatctgtgaagtggatcagagctttcctgtcaaggttaggggtcatccagcactgctcctacccactgctatgaactcttatacatgcctaaaaaccccacattccatgccccctcctccaatctagactccctcagctcttgtccctccacctagtccagttctgactctgtggaattgggggcatctgtgtcttgttctgtccccctctactggagctacttgggaccagcactggggctgaattatctcaggggtcctggcatgctcttagcattggagctttcagttcctccttcatcctttctctccttcctctacagggagggactttccccccaccaagcccacactggcaatgactctgtagctcaaacttgcctctctcttcagacaggcactggacggggcctgcaggggtctccacagagaccatcaggatgtcgtattttggggagcatttttgggtaagacccactcttatttaggcgggggatgctggcagggctgtggggacttttatggagatgggaggactgggtgagttgcggttacagccttggacaggtagaggatctgcaagggatggaagttaaagtgggaagagtcaggctgggtttgaatccacacccaccccagacctcacaggccttacaaccttgggcaagtcatagcttgtgtcatagggagaccaagggccagagtgggaacgtctaggcaacctgaagttgccccatgaaaaagtgcagagtcagtgctcaaacccagggccaaactgaacttccaggacccagggtcattccagccagggaacttccacccccttcccatcctggagaattggggggttttcctgacctggcgtctcatggcctgtgcacccctccactgtccaggctggagatcacctcctgtagcccaagggctgctgagtgagacagagttgtttttattcattcatttcctctctccctgccactgtgacctcatccccagccagccctaggagatgctggggtctccaagagaatccatcccagccccagccccaagggaggagtccccagtctgggggacccagagccagcttagacaccttcagccctgcaggaccagggctgaacccagccttgggggtcctagagtaggaaccaggacacagaatcgtgtttgctgtgagaaagcctgggcaaaagaccagagatgtgacattgagtggcaagttcagggaacagggactcctcctgcagagccaggctaacagggtgccacagaggatgggtgaacaggggagggcccaggagtcagggaaggaccaggtcagaaagccccttccccagttgcaggccctgagcttgcagtgaggaagcctgttgctaggcgactggttgcccctggcaacaagccccactcctgcccttgctccctccccagctggggctcctcttgaaagcacttgctttcttaaaggggccgcactcccttgccacctgcaggggtgtgacctccgccctctctccaaaggtcagactccccgatttgcccctgaaaggctgtgtgactccagtgaggggctacccctttctgagctccttttagtactgccgtgtaatggaggtgaccatttgaggatcaaaagtcacctgcattttggaaccccgacagtggcacctacatttattttaaatcctttttaattgtgtgaggcgtgcaggctcgctgcagaaaattcagatcagcaaagagaaaatagaaaccacccccgacttccccacctcacccaaagatatcctggtagagaatggttaagagctttgagttcaggattcgaattgactctgctggaagcccttgagcaaatgactttgcctgcccgaacctctgtttccccatctgggaaaaagggatgaaattcctgcaccgccactcccaccccatgcaccccacacacccccagactcagggaggcctcctgtgacatctgtcatcagttgctagtattgaagccgccatagaagcctggttctttgctgggtggtgctggggagattaagccaaacagggatgccccagtctcattgcgccagggcagggccgaagcatgaagtgtactagggagccatgggggaagtgtgagcaggagagggacataaacaagctctgttacaaagaccacactcttggctgggcgcagtggctcatgcctgtaatcccagcactttgggaggccgagggaggcggatcacctgaggtcaggaattggagaccagcctggccaacatggcaagaccccatctctactaaaaatacaaaaattagccgggcatagtagcatgagcctgtagtcccagctactcgagaggctaaggcaggagaattgcttgaacccgggaggtggaagtcgcagtgagatcgcgccactgcactccagcctgggtgatggagtgagactccgtctaaaaaaaaaaaaaaaaaaaaaagaccacattttggctggcacagaggccaagtctgaagtctagaagttctggtgggagagacagacctgagacagcccctcctaggaccctcggctgccagcccagtccaagagaggcagacgctgctgggggtttgccaggtctgggaaacgggccagcagttggctctgagtcagacccagatgctgctctgggcggtggtgcctggtgcagcctcacccgaggatctcctggggccagcactgtgccagcctcatcccagcaagacccttgggagttgggtgctgttgttgtccccatttgtcacacaaggaaggaaactgaggccagagagacgaagtcaccaacccaaagtgaccctgtacgtataaggagattggacacttgaactttgaaaatataattccaaacacaagaagagaaaatataggtggagcgtggtagctcacgtctgtaatccaaacactttgagaagctgagatggcggatcgcctgagcccaggactttgagaccagcctgggcaacatagcaagaccccgtctctactaaaaatacaaaaaattagctgggtgtggtggcgcgcacctgtggtcccagctacttgggaggctgaggtgggaggatcgcttgagcctgggaggcagaggtttcagtgagccaagatcataccactggactccagcctgggcgacagagcaagaccctgtctcaaaaaaaaaaaaaaaaaaaagccgggtgcggtggctcacacctgtaatcccagcatttgggaggccgaggcaggcggatcacaaggtcaggagatcgagaccatcctggctaacacagtgaaaccccgtctctactaaaaatacaaaaaattagccgggtatggtggcgggcacctgtagtcccagctattgaggaggctgaggcaggagaatggcgtgaacccaggagacagagcttgcagtgagccaagatcgcatcactgcactccaacctgggtgacagagtgagactccgtctcaaaaaaaaaaaagagaaaacgtattcctggcgagctggagggagcaacagtgaagtgggggagggggttgagcagggttagggaagtttctagagcaggtggcaatgatccttgggaagtggaaggatgtggatgggtggaaggagatgcaagctggagagctgatggcgggaatagcctggacaaaatgtggtggtggaaaggcactgcctgtctttgctatttgctgttttgtgggtgaggctaggaagaagctaggagatgaggctggagcagcaattccaggccatggacttggacttcagcatctggtgggcaatagggacccattgatgattctagaatgaagtgtgaccattgggagatttgggcttgaggctgacctgggtctgccccagtcttggcttcggtgtctccattggtgcagcaggaaacgttacctagcagtgacttctggctttaaccttcaggcttctggccaagtgtggtgactcacgcctgtaatctcagcactttgggaggctgagatgggaggattgcttgagtccaggagttcgagaccaaccttggtaacatagtaaggccgtatctctactaaaaataaaaaaaactagccaggcctggtgtcacatggctgtggttccagctacttgggaggctggggtgggaggatctcttgagcccaggaatttgaggctgcagtgagccatgattgtgccgctgcactccagctggggagacagagcgagaccctgtctcaaacatagaaaaatatgtataacattcaagcttccgggtacctgggagggtgaacctggtaggttggaggagggcacaggaaactaccatttatggaaaacccgccaaatgctgccagagggatggcttcactgatgtgtgttgggacttaaatggcatcagatccctccacaagccttctcttccagtgttattataagacctgatttggtgctaaaatgtccccagttccctcagaccccagctgattaccttttttttttttttgagacagagtcttgctctgtcagccaggctggagtgcagtggcgggatctcagctcactgcaacctctgcctccctgcttcaagcaattctcccgcctcagcctcccgagtacttgggactacaggcgcccactgccacgtctggctaatttttgtatctttagtagagacggggtttcaccatgttggccagtctggtcttgaactcttgacctcgagtgatttgcccgcctcagcctcctgaagtgctgggattacacgcatgagacaccacacccatctagtcattgattttaaagttgtaatggtgagttttaagtccaaatctaaaggtgtccaattccaacagcgggcgcagaggaccaggtctccaaggggtggagagaagcgggatcagaaggtgtgtatgaggccgggcgtggtggttcacgcctgtaatcccagcactttgggaggccgaggcaggcagatcagttgaggtcaggagttcaagaccagcttgaccaacatggtgaaaccctgtctatactaaaaatacaaaaatcagccaggtgtggtggcacacgcctgttaaaaaaaaaatcctcatgtttaatctatattggtcttgcttttagccttttcctcagttctattcatattgtttattattttttgttttctgtagatggtcatataatctggtctcaattatttttcttaccttactgcatttgccaacacctctacatcagcattaaatattagccatgatttgaggcattcctgcctcatcctgaaatatgttgtgtctcctgttttgccatctttttttttttttttgcattgggggacagagtcttgctatgtcacccaggctggagtgcaatggcacgatctcagctcactacaacctctgcctcccgggttcaagcgattctcctgcctcagcctccgaatagctggggttataggcatgtgccaccacgcctggctaatttttgtatttttagtagagacggggtttcaccatgttggccagtctggtctcgaactcctgacctcagataatctgcctgcctcggcttcccaaagtgctgggactacaggtgtgaggcaccgcgcccggcctgattaccatttttaatggacagcttagtagtgttcaggcatgatgcccttcccaggtgacagaatctggccggcgttaagatatagttgttgcctcattttttcctactcctttcatgcggcagagggtcccaattttccattgagagtggcagaaaaagttgccctttaacataaatgtctttggggaagaagcataagcaaatttaaaacaaatgctaactattaataactaatgttacgaattagcaaaaactagagtggcctttggggctttggggagcattgacatggattatcttgctgcttgtatcatctccatgtaagaggcagatgtctcccaggctgtagtgtagtgacatgattttggctcattgtaacctccgcctcccgggttcaagtgattctcctgcctcagcttcctgagtagctgggattacaggcacctgccaccatgcttggctaattttgcatttttagtaaacacggggtttcaccattttggccaggctggtctcgaactcaagacctcaagtgatctgcctgcctcagcctcccaaagtgctgggattacaggggtgagccaccgcgcctaacctccctgccccatcttaatgaggagctcctaaaagctcagagggggcagtgacttgcctgggtcacacagtgcagccctggcctcccccaccatgacaaccccagaaattggagtaaagagattttgtgaaggcattcgcaggcaccagggtagaaatactcagttcccagtggcactaacaggtaacagcagaatcatttgtttatttattcaacgaactcaaatgccctttctgtctctcattctgtgctgggctttggtgggtcctgggagagaactcaaacctggaccctaatttgggttctcataggcggaatttccatgttgacaagaacagaaaacacaactacagtgacttaagcaacggggactgtattggcttataagatcaaatgattatgggggaatgtggctttcagggttggtttgatccagcaactcaatttaacacacttttttttttttgtagctagtataaatgggatcactttcttgatttcttttcagctatattttattaatggtgtatagaaacgctactgattttcatgttgatatttgtattttgcaatttaactgaatttgtttatcagttctaggagttttttggtggtgtgtttaggccttcctatacataagttcatgttgcaaagagagacaatttgacttcttttcatgtatatacatatatatatatatatatatacacacacacttcccccccgccctgagacggagtcttcctctgttgcccagagctggagtgcaatggcgtgatctcggctcactgcaacctctgcctcccacgttcaagcaattctcctgcctcggcctcccaagtagctgggattacaggggtgcgccaccatgcctggctaatttttgtatttttagtagagacagggtttctccatgctggccaggctgatcccaaactcctgacctcatggtccgcccgcctcagcctcccaaggtgctaggattacaggcgtgacccactccaatttatttttatttttatttcattcattcattcattcattcattcatttattttgagacagtcttgctctgatacccaggctggagtgcagtggtaggatctcagctcactgcaacctctgcctcctgggctcaagcaatcctcctgcctcagtctcccaagtagctgggattacaggcacgcgccaccacgcctggctaatttttgtatttttagtagagacggagttttgccatgttggccaggctggtctcgaactcctgacctcaagtgaaccacccaccttggcttctcaaagtgttgggattacgggcgtgagccaccgtgcccagctcaacacacttttttttttttttaaatataaaagccctctggttcagcttctttctaaggttcacggtttccatttgacttccagtatcccctgtggccacataattcctcatttatggaaagacacaaagagaaaaggggaggagactgagacagaaacggcagagagactcagaaaaacggagagaaagacagagacacaaagacagaaggagacaaagacacagaacaaatgagattcctccccagcaactataggacaaaaagaaaatcccaggcttctctctgattggacaaatttaaggtccatagacaatccctatggcccaggggaaatgcagcaagctgattcgctcaggcccgaacaagtccctacagccaaggggatggacttctgctccttggccacgcccccgttgctaagcaactatgatgttctctccatcctttctcaatctctattcccatcccctgcagggcgagaaaaatcatggctttgaggtcctgtaccacagcgtgaagcaggggcccatctccaccaaggagctggcggacttcatccgggagaggtgaggtccccaagccccatccaccagaggccacgcccaccatcctgtagtcacgcccacctaatggctacgccctgcatggtcaggggctagaaccctggggattccaggaaccagaggggctcgaaaatcctggaaatgaccgattctcaacccggtcaggcccatatctccttttaaacaacaatcacctgatttcgaaagctcccctcctcaaaagaggatgatataacctactcaaggttggaatttttttttttggagacaagatcttgctttgttgcccaggctagagtgcagtgacccaatcatagctcactgcagcctcgaactcctgagttcaagagatcctcctacctcagctcccgagtagctgggactataggcatgtaccaccacatctggcttttttttttttttttttttttaaacagagttttgctcttgttgcccaggctagagtgcaatggtgcagtctcggctcactgtaacctctgcctcccgggttccagcaattctcctgcctcagcctcccaagtagctgagactacaggtgcctgccaccacgtctggctaatttttttatttttagtagagacgaggtttcactatgttggccaggcgggtctcaaactcctgacctcaggcgatccgcccgcctcagcctccaaaagtggtggaattacagatgtaagccactgcactctgcctttttttttttttttctttttggagacagagtctcactttgttgcccagggtgatctgatcatagctcactgcagcctcgacctaccgggcccaagcgatcctcccacctcaggatcctgagtagctgggactacaggcatgcaccaccacacctatctaagttaaaaaaaattttttttgtagagaaggagtctcattatattgcccagggtggtctcgaacccctgggttccagtgatcctcctgcctcggcctcccaaagtgctgggattacaggcatgagtcaccatgcccagcctactactgttgttaataaaatatattacgtaagaaaaaatcttctatgaattttcaaaacatccctcagagtgttgtgtcatccccccattatggaaagccactgctaaggtgtttgagatggggaaactgaggcccagaggagcagtgcctctctcaagggtgtctgaaagcttcttcatctttttttttttttgcgatggagtcttgctttgtcacccaagctggagtgcagtggcacgatctcagctcaccgcaacctccacctcctaggttcaagcgattttcatgcctcaacttccccagtagctgggaattacaggcatgcaccaccacacctggctaatttttgtatttttagtagagacagggtttcaccaagttggccaggctggtcttgaactcctaacctcaggtgatccgtccgcctcggcctcccagagtgctgggattacaggcgtgaaccactgcgcccgggcagtttctccatctttacctcattctcctccccagggccaccatcgaggagacctactcgaaggcgatggcgaaactctccaagctggccagcaacgggacccccatggggtgagtggggtaggggtcaccaacatggggacattgggagcctcctccttggtggacatctcttcacactcggtgcatgtagaatagagtgtcatccacctcgattatggggctatttggatagagggatgtatatcattcattcacacactagctcattcattcattccacaaatattttttgagtgccttctgtgtgccaagcaccagcagcaacccagacagataaaaccccagccaccttcatgcaatgtacatctgggctgtgtgagaagagagatgttaaatacaaacaaaaacattttttttctgaggtgaaaagtgctgggaagggggccaggtgcggtggctcatgcctgtactcccagcactttgggaggctgaagtgggcggatcaccggaggtcaggagttcaagaccagcctgggcaacatggtgaaactcctctctactaaaaatacaaaattagtcgagtgtggtggcgggtgcctgtaatcccagctactcaggaggctgagtcaggagaatcgcttgaacccaggaggcggaggttgcagtgagccgagattgtgccactgcactccagcctgggcaataagagcgaaaactctgttttgaaaaaaaaaaaaaaaaaagtgctgggaagggaatgagataggagtgtgagagatcgggcactttctctggggtgggcccgacctccctgaactgagaccttaatagaaaggggcaggccatggggatgtctgagggacagagacccgggcaagtggctcagccagtgcgaaggccctgagttgacaggcgtggcatgtttacggaagagtgaggaggctggcctggctgcagggcttgggcaacgtggaaaggaagtaggaggggagatggcagggtgaggcctcaggggcctgacacacaaatgactttgcatgaaccttgtgcccgggcgcggtggctcaagcctttaatcccagcattttgggaagctgaggtgggaggatcacttgaggccaaaagttcgagaccagcctgggcaacatggagaaacccctgtctctactaaaaatgcaaaaattagccgggcatggtggcatgtgcctgcagtcccagctatttaggaggctgaggcaggaggatggcttgaacccaggtgatggaggctgcagtgagccatgattgtaccactgcacttcagcctgggtgacagagccagaccatgcctcaaaaaaaaacaaaaataaaaacaaaacacataatgtggtcccccgatggcatttgcagttttctttgtggctgctatgaggcaaaagttctgtggggcaggcagaagtggaggcagcaggaggagaaggtggagggaggctggatggggcttctgctgagtggggcaggccaaattgactcgattggggcatgtggtgtcttagtcactcttttttttttttttttttttttttgagacagagtctcactctgtcgcccaggctggagtgcagtggcgcgatcttggctcactgcaagctccgcctcctgggttcacgccattctcctgcctcagcctcccgagtagctgggactacaggtgcccaccaccacgcccggctaattttttgtatttttagtagagacggggtttcaccatgttagccaggatgctctctcaatctcctgaccttgtgatctgcccacctcagcctcccaaagtgctgggattacaggcgtgaaccatttttttttttttttttgagatggagtctcgctgtgtcacccaggctggagtgcagtggtgtgatctcggctcgctgcaagctccacctcccgggttcaagcgattcttctgccacacccagctaatttttgtattttaagtacagacgggggtttcaccatgttgctcaggctggtctggaactcctgacctcaagtgacctgctcgactcggtctcccaaagtgctgggattaccagggcctgcgtttaaattccagctctaatgttgatttgttgaggggccttgggaggagctatagagctccctatgcctcagtttccccatctgtcacaggcccgcctcttacagctgccatggagattatatgaattagtattcattcatgtttagcagggctcagcgtgcagcacatacctgagccagtgccagcgctgtcccggggtggggtgagcctgatgaaccctgggtgtgaccttgcccgcccccaggaccttcgccccgctctgggaggtcttccgcgtctcctcggacaagctggcgctgtgccacctggaactgacacggaagttacaggatctcatcaaggacgttctccgctacggcgaggaacagctcaagacccacaagaaggtgtgtgtcgtgggcgccgcccagcggctgggtgggtgtggaacaccggcagctcacaggaccccagatcttctggggctttataacctgcggatgtccgcctccgagaattccgttaattccacaacgtcaagcccagggtcttacggacctgagcgttgttgaatttcaaacttgcaaaattccagaccaggagttagcacactgtggcccacgggccaaatcccgcccaccccccaccaatgtttgtacagctaagaagggttttttttttttctgcttgtttgtttttaagagacagggtctcactctgtcacccacatgcagtggcgtgatcagagctccctgcagcctcaaacacttgggctcaagcgaacctcctgcctcagcccccacagaatagctgggactacgttgcacgccaccatgcctggctaatttttaaaaaatgtttgggcctggcgtagtgactcatgcctataatcccagcactttgggaggctgaggcaggaggatggctggagcccaggatcctacaggagtttgagaccagcctgggcaacatagggagaccccatctttaccaaaaaaaaaaaaacacccaaaactacccaggcatgatggcacatgccggtagtcccagctactcaggaggctgaggtgggaggatcacttgagcatgggaggtcgaggctgcagtgagccatgatcatgccactgcactccagcctaggcaacagagaaagactgtctaaaaaaaaaaaaaaaaaaaacaagagagagagatgggttatcactggtttttacattattaaagggttagaaaaaaatctaaagaaaaataaaatttcaccacatgtgaaaattgtatgacagtcacatatcagtgccagtaaataaagttttattggcacagagccatgcccattgatgtgcctgtcatctgtggctgtttggcactgcagcgacagattcaagtgtttgtatcaagccaaacacatttgctatctgtccctttacagaaaacatttgccaacagctgttctaaagcattggaagttacagatattcatatttactatttttacactcttataaacctagaatcagaagaaccatcttagactcttagaattccacaatatccaaagcttataattgtagaatcatagatgcattgtctttacagagttccaaaatctgcatgtttttatgtcttgtttaaaaagggggttggtaatactttgtttttgttttgttttgttttgtttttttgagatggagacttgctctgttgcccaggctggagtgcagtgtgcacaatctcagctcactgcaatctccatctcttgggttcaagcaattctcctgcctcagcctcccaggtagttgggattacaggtgtgctggtgcacgcctggctaattttttgtatttttagtagagacagtgtttcaccatgttggccaggctggtcttgaattcctgacctcaggtgatctgcccgcctcagccttccaaagtgttgggattacaggtgtgagccaccgcgcctggctttgctgatttttaaattttttgtatagaagggatcttgctagccaggagcgatggctcatgcctgtaatcccagcactttgggaagttgaggcaggcatatcacttgaagtcaggagttccagaccagcctggccaacatggtgaaaccctgtctatactaaaaacacaaaaattagccagacgtggtggcacacacacctgtaatcccagctactcaggaggctgagacaggagaatgacttgagcctgggaggtggaggttgcagtcagttgagatcgcgacacaccactccagcccgggcaacagagtgagactctgtctcaaaaacaaaacaaggcaaaaaaaaaaaaaaggagagagagaaggggtcctgctgtgttgcccaggctggtcaaacatctaacatatctgcctcagccttccaaaatgttggcattacaggcatgggtcactgtgcctggccaggagtgaatttttaagtggtaaaagcaggccaggcgtggtgtgcatgcctgtagtcccagctacttgggaggctgagctgaggtgtgagaattgcttgagcctaagagttagagaccagtttgggcaacacagtgagaccccatctcttaaaaaaaaaagctgggcacagtgacttatgtctgtaatcccagcactttgggaggctgaggcgggcagatcacctgaagtcgggagttcaagaccagcctggccaaaatggtgaaaccctgtctctactaaaaatacaaaattagccgggcatggtggtgcatgcttgtaatcccagctacttgggaggctgaggcaggagaatcgcttaaacccgggaggcggaggttgcagggagctgagattgtgccactgcactccagcctgggtgaaagagcaagactccgcctcaaaaaaaaaaaaaaaaaaaaggcctggcacggtggctcaagcctgtaatcccagcactttgggagtccgaggcaggcagatcacgaggtcaggagatcgagaccatcctgactaacacggtgaaaccccgtctctactaaaaatacaaaagaaaaattagccgggcgtggtggcggcgcctgtagtctcagctactcaggaggctgaggcaggagaatggcgtgaacccgggaggcggagcttgcagtgagccaagatcgcgccactgcactccagcctgggtgacacagcgagacttcgtctcaaacacacacacacacacacacacacacacacacacacacacacacacacacacaaaacggtgagttaagcaacacagtctgccactgtttgtcataaaacttgggttagaacaagcatctttatccatatgcggattatttctagagaagtatcacagtaataattggggacttctaggctggagggcccatatatgggaggctttttcctggcttacctcttacaactttctgaaatatgaaccatgtgtaaatagtacttttttttaaagttaaaaatgttttgaaatgaaaaacgtacaggccgggcgtagtggctcacacctgtaatcccaacactttgggaggctgaggcaggtggattgcttgagtgtaggagtttgagaccagcctgggcaacatagcaagaccccattgctattaaaacacacacacagaggccgggcgtggtggctcacacctgtaatgccagcactttgggaggccaaggtgggcagatcacctgaggtcaggagttagagaccagcctggccaacatggtgaaaccccgtctccactaaaaatacaaaaaattatctgggtgtgatggtgagcacctgtaatctcagctacttgggaggctgaggcaggagaattgcttgaaaccgggaggcagagattgcagtgagtcgagatcgtgccactgcactccagcctggacaacaagagcgaaactctgtctaaaaaaaaccaaaccaaaacacacacacacacatagaaaaagactgtggagctgacatcacgtggagtgtttgggaggtcaggaatttcacagtctacccatgaaatcccctcctaccccgcagtgcaaggaggaagtggtgagcaccttggatgctgtgcaggtactctcgggcgtcagccagctcctgcccaagtcccgcgagaactacctgaaccgttgcatggaccaggagcggctgcggagggagagtaccagccagaaggagatggacaaggtgggctcacagtgggggggttctgaggaatttgccgcggggcggaggggctgcctgatcagagagtggaaacacatcccagagcgacggtcctggaacctgtgggtgatcacaccctgggtaccccgaggagttcacctgccaggtgatggggcctgggggaggccccctgagtatcgccctcccatccccgtttcctccctgtgctttgtaggcggagactaaaaccaagaaggcggcagagagcctgcggcgctcagtggaaaaatacaactcagcccgagctgactttgagcagaagatgctggactcagccctggtaagaaccaggcatctgtacctttaagacccacacatgcctttgccctggaggttatggactgcagaaatcccaggcagggtgtggtggctcacacctgtaatcccagcactttgggaggccgaggcgggaggatcacctgaggtcaggagtttgagaccagcctggccaacatggcgaaagcctgtctctactaaaaatacaaaattagccgggcgtagtggcaggtgcctgtaatcccagctactcaggaggctgaggcgggagaatcacttgaaccagaaggcggaggttgcagtgagccaagatcgagccattgtactccaggttaggtgatagagtggaaccctgtctcgaaaaaataaaataaattcaagcagattggaatctgaggattaggaatcagaacttttttcaagttacaagtgatagaagccttcattcaaaccgacaggtgtatataaaaaaaaaaaagaaaagaaaagaaaaaggctgggcgcggtggctcatgcctgtaatcccagcactttgggaggccgaggcaggtggatcacgaggtcaggagatcgagactatcctggctaacacggtgaaaccccctctctactaaaaatacaaaaaaattagccgggcgtggtggtgggtgcctgtagtcccagctgctcaggaggctgaggccggagaatggcgagaacccaggaggcggagcttgcagtgagccgagattgcgccactgcactccagcctgggcgacagagcgagactctgtctcaaaaaaataaaaaataaaataaaaaataaaatttaaaaaaactgacaagctcagggaactgtaaagttttatttttgagttgtggaggtttcagtcatagctgaatccatgtgctcaaatagtgctggcaggaaattgtgaatttctgcttcttttatttttttgagatgggatctctctgtcactcaggctggagtgcagtggcgtgatctcagctcactgcaacctccgcctcctgggctcaagtgattctcctgcctcagcctccctagtagttgggattacaggcacgtgccaccacacccagctaatttttgtatttttagtagaaacggtttcaccatgttgcccagactggtcttgaattcctgacctcagatgatccacctgccttggcctcccaaagtgctgggattacaggcatgatacaccacagctgaccactatttctgcttcttaagtctgtttttctctctggggacatcactcccacacagacatccccttgtgtgtgtgtgtgtgtgcatgtgtgtgcaagcatgcacatgtgtgcatcaaactgggcaccagcaacccccacttacatcccatcagcacattggctcaggaatggaagtgccttttcctgtagagtcaatgaaagtcctagggcagactctcattggcccttccccaaatcaatcactgagccaagggcttagggtattctgattggtcaggctgagtcatatggccacttcttcttggccctgacctcctttccacctgcctctgccctcctgcttcagcgcttccaagccatggaggagacacacctgaggcacatgaaggcactgctgggctcatatgctcactcggtggaggacacgcacgtgcagattgggcaggtgagttgggcaggtgtgaggaatgaggctggggtcactgctgggcaaaggggccttgaccagttacacaccccgcccacccggcacaggtgcatgaggaatttaagcagaacatcgagaacgtcagcgtggagatgctactcaggaagtttgcagagagtaagggcacaggccgggagaagcctggtgagtcagggcagccattgggggtcgggcttcggggccacagctgcagacaggcatgtgccaccatgcccagctaattttttttttatttttttatttttaatagagacgaggtttcaccatgttggccaggctggtctcgaactcttgacctcaggtgatctgcctgcctcggcctcccaaagtgctgggattacaggcgtgagccactgcacatggccaggccttggtttcttcatgggaaaaatgggctgctgacaagtccagctctccagcctgatcttatgtgtaaatgtctttgaaccagatcccagaggagccttgaatgccaggcttggctgatcagacttcacccccagggcctaagggagccattgagggttgttgagcaaaagaacaatttgggaatgcgcagatgcaggactgggaaggagttaagagcaaaagttttagagtgagacgtgggtttgagtcttttcttcatcgcttgctgtgtgacctaggacctgtgctttgacttctctgagcctcagtttcctcatctgtaaagtgaggatgtaataatgttgcaacattcagtgatttcatgcaggtaaagggcaaagggtgtgccaggcacacagtaggcactcactaaatgctggtatacagttacgtcctcaagtcttgttaactagcaaaacctgttctttctccctcctgtcgctctggctcaggcctggctcaggtctcccctccctgcatggggccccactcttgcccttcacaggccccagatctgttttgtcctcctcctgctcacacaccttccatggctccccattgttcttgggagagagttcccactccttatcctgtcactcaaagcccagcccactgcacagacgcatggtccattccccgacccaacccaagttccagccacaaatgctggaagtatgtagaagtagctcatgtcaccccctgcggtggcactgccctgctggaaccagaccagccccttggtccatcccacttctgatgatgtggggctggttcttgtccgggaacctgatggaccttgagttcagatccaggtgccattttgtggccaaaagtgtactaccctttccaagcgcagtctccccaccctcaatttagtttctttctctctctctctctcttttttttttttttttaatttttttgaggcagagtcttgctctgtcacccaggctggagtgcagtggtgcagtctcggctcactgcaacctccgcctcctgggttcaagcgattctcctgcctcagcctccccagtagctgggattacaggcgcctgccaccatgtccggcttttttgtaattttagcagagacagggtttcaccatggtggccaggctggtcttgaactcctgacctcaggtgatccgcccgccttagcctcccaaagtgctgggattacaggcatgggccaccgtgcccagcccctcaattgagtttccgtctcctgtctcaggacctctggacttcgaggcatacagtgcggctgccctgcaggaaggcaagtacgtctgggcctggatgcccaggctggaccatgggggtgagggaggctgatctgaatgtgaaaggaggctcacagtgctcaggtgccccccaatctatcctcagcgatgaaacgtttgcggggagccaaggcctttcgccttccaggactaagccggcgggagcgggagccagagccacctgcagctgtgtgaggaagcacccctgcccggtctggcccaggctagaccgagatcccctcccctgcccaggctatcccagaagtcccctcctaggatagcccaggagtatccatattccaggctggaccaggattccctctacctgagctagaccaggagtacctctgcccccggctagctcaatattaccgctgcccaagctagtccagaattcttccttttgctaggttaggccaggaattgcctgtcccagagtaacgtagcatcttccctgcccaagctggcccaggattgttctgtttgccaaggctagccccgactttccctatcttcacaaggcagcccttcaaatgagttccaggattccttccctcccaggctgtttgagaacactctctactcagctaacttcagattcaaccccctccccaagcaagccccatggtcccaccgcctctagggctagctcagggcagtatcacagtctgggagctgccccagcttccatgtccagtgttgggggctgacagggggcaccagatgggctgcggaagctgacaccaacatctcttcctccatccccagagatttcctggagcccgattcaggggtgagtgatgtgggaggggtcaggctgggctacaagtggaaggagtttgatcccactcttggctcctagagtcccgatccctactggaaactaaagagccgagattgaggggcgggctggagcctgggggctgggttcatatcccacctcagctgcaaagtcccatggactacgtgggtgtgaataatgtccctgccgaagctcagtttgtcccaggaacctgcccacacacccagggaagacagtcgttgccatcagggttggttttgaggtctgagtcaaggcctgggggcagggcggggggcggttggcagggtgagatggaaggttcgatagtggggcgcctgactcactgctgccccctgactcccctagacatgtccagaggtggatgaagaaggtttcactgtccggcctgatgtgacccagaacaatatccttctggcaccccctgggggcagttgttggcacagcaaggacaaaattctccgtaataaccagtccaccttcagcagtcctctctgtgtacatcctggagagagtctcctttgtggatgaagccaacctaaatgtaaacacccactctatggggtcagcactgggcaagagggagagagaaaaggagatctagcagggcttcctggaggagggggcaccagtgttggggttttgcagccgaataggagtttgccagttagttctgggcatgcttgtgcaaaggcttctcggggggggtgggagtgctggtgggacatggtgtcaggactgaaggtggcgcgtggtgagcgatgggattgggcaggacctcgaagggtttgagcagggagggacgaggctggattggagagctgactgggggaaagcttgtgttgggattggcttggaccttgactgcagcccacgcacggccgagccctcccgtttctcgtccagcgactccgacttcgacgatgaagagccccgcaagttctatgtgcacatcaagcctgccccggcccgggctccagcctgcagccccgaggcagcagcggcacagctcagggccaccgcgggcagcctcatccttcctcctggcccaggggtgaggcgtgggaggggtgccctgggtgttgctagagaggctggctggatgcattcgtgtgtgatgttgcccactttgtccacagggcaccatgaaacgccattcttcacgtgagtagcctttggtcttcagagtggggaggatcctaaggaagggaggctatgggtttgggcttgaatcataactccgttttgtaactttgggcaggctgcttaaccacactgaccttcagtctccttttctgtaaaatgaggtcattatgaaattaagtgagagctgaaaggggtagctggggccaggagaagctagcatctggagacaggctcgcttaggcttgaatccatgtctgcctgatttgctgatcaccttgggcaactggctggacacccccgagcctcggtcccttggtctgtggagtggggagcattgcaggcagggtgacaagaaggctgaaggaggtgcatctcttgtaggggacgctgctgggaaaccccagagacctcggtctgcccccagaaccagcaggtgggttccacacgagtgggcaggtgggggctgtccccacctcctccctccacctccccatgtctccgcctggtgttctcttgtcccggctgggagttgacgtcatgctggggtttttttgtttttgtttttgttttgagacagagtctcactctgtcacccaggctggagtgcgatttcagctcactgcaacctccacctcctgagttcaagcgattttcatgcctcagcctcctaagtagctgagattacaggcacccaccaccacgcccagctaacttttgtatttttagtagagacagggtttcaccatgttggcccggctggtctcgaactcctgacctcaagtgatctgcccacctcggcttgccaaagtgctgggattacaggcatgagcccttgtgcctggcccatgctggcttttgagggaccatttagtcattcatttgatgaacatttattgagtgcctgctgtgtacctgtgctgttctagggtctgggttctgagacaggtctcccttctcagagtcacattctagtgactccagattttaagaatagcaaatagggccaggcgtggcggctcacgcctgtaattccagcactttgggaggccaaggcaggcggatcacctgaggtcgagagttcgagaccagcctgaccaacataaagaaaccccatctctactaaaaatacagcattagccaggcatggtggcacatgcctgtaatcccagctattcgagagggtgaggcaggagaatcgcttgaacctgggaggcggagcttgcagtaagccactgttgtgccattgcattccagcctgggcagcaagaggaaactccgtctcaaaaaaaaaaaaaaaaaaaaaaaaaaagcaaataagttagagcatattcgatacttctaagtgctacgaagaaactaaagcagatgacgcgaagacaggaggaggtgacttcccttgaggtggggttgggaacctccctgagggggtgacttggagctaagccccaaagaggagctaggaggtgactgtgaagagagctggggaaatggaactccagactgggaacaggctgcacacagtggctcacacctgcaatcccagcactggccaaagcagccagatcacttgaggtcaggagtttgggatcaggctggccagcatggtaaaaccccgtctctgctaaaaatacaaaaattagccgggcatggtggcaggtgcctgtaatcccagctactctggaggctgaggcaggagaatcgcttgaacgcaggaagcggaggttgcagcaagctgagatcgtgccactgcactgcagcctggccgacagagcaagactccgtctcaaaaaaaaaaaagactgggaacagcatgtgcaaaggccccagggtgggatgaggcttgggaaaaatagaagcagccctcttggcctcaccctctctagctgtgcagagagattgcagtcagaggagcaggtgtccaagaacctctttgggccgcccctggagtcagcctttgaccacgaagattttacaggtgatggggataagggattggagggcatgggtgtggccggagggaggttgggtggggccattgcagagttaggccaatgaggtcccctggaagccaggctggagggaggactagtccgtgtaggggtgggcggggccagagtgcgcgtgggaggggccatagatagggtggggccttggccagtgggcggtgactgagtggatgggccggacatttgtggagagggaagtcaccagaaggtgtagccttgggggcgtgcacaaggactttgaatgggggcccccctgaccttccctcgacgtggccgtggcctgcaggaggatgggcagggactctgagtgggcgagggtcggagctgaccgcccgcttccctccccaaggctctagcagcctgggcttcacctccagcccctcccctttctcctcctcgtcgcccgaaaacgtggaggattccggcctggactctccgtcccacgcggcacctggcccctccccagattcctgggtcccccgcccaggcaccccgcagagcccgcccagctgtagggcgccacccccagaggccaggggtatccgggcaccgcctctgccagactcgccgcagcccctcgcctcgtctccaggcccctgggggctggaggccttggccggaggaggtgagtccagcgggcctgggcctgagagttgctggaaccctgggcgggggattgagcgcctgctttgggcagggcctgatcaggctgctggagacacagccaggaccaggcaggcagaacctcccaccgttgcagggacaacaatgagatggacatttagcaaggcaggcggtagcgggtgccaggtgggggccctccctgaggaagggacatctgagctgagatttgagggaggtgaggacagaaccacgtggacatgaggggaaaggcgtgctgggcagagggcacagcccctgcaaaggtcctggggcaggagcgcgctaggcctgtctgaagaacagcaaggaggtctgcctgctggaacggggtgatcacggaaggaggaagaagagaaggcagggaccaggaagggcctgatgggcccagggagggcttgtgaatgttaccctgagtaacgctgagggccatgagcaggggaggggcgggacctgactcaggggtcacaggctccctctggcagcttcgggagtgagggcagaaaccagagactggggaggcaaccagggaggcaagtaggcgatgggggtaagggtggcagtgggagaagcaggtggaaaggtcgctgcaggggagagttcggaggagtaaggatggggaaggagcggagtcaagggagggaggaggatggggaaggagcggagtcaagggaaggaggaggatggggaaggagcggagtcaagggagggaggaggatggggaaggggcggagtcaagggagggaggaggatggggaagggacagtcaagggagggaggaggatggggaaggggcggagacaagggagggaggaggatggggaaggggtggagtcagggaggggtgggggacgtcgaggctgtgcctttaggtgtcaggtgcacagtggaccctgagtgtggggaaggtcaggtcagagcaccccctccttgaagacgtcatcaaaacaggaggagcagccgcccagggagagcagaggagaggacagccggggagcccagaggggttggagacaggaggacagcaggagatggggggagagcggcgggatgggctcctgggggctgtctgaggagaatgggaagcccccgagtcagagggactgtgggctgtgaccacccgaggtccccagtagtgtcaacaagggctcctggcaccctccataggaaagggccaggctggagcccgttcaagggagagctgagtgggtggagaccacagagtgggggcagaagaagctcttttttttttttttttttttgagagggagttttgctcttgttgcccgggctggagtgcagtggtgtgatcttggctcactgcaacctctgcctcccaggttcaaacagttttctgcctcagcctcccaagtagctgggactacaggtgcgtaccgccacacgtggctaatttttgtatttttagtagagatggggtttcaccatgttggacaggctggtctcgaactcctgacctcaggtgatctgcctgcctcggcctcccaaagtgttgagattacaggcgtgagccaccgcacccggcctgagtagaggctcttatccaaccctgcaaattctgcccccccaggggacattgtcagtgtctggagacatttttggttgtcaccaccaggcaggagtggtgctcctggcattcagtgggtggaggcctgggttgctgctcagcaccctacagtgcacagggcagcccccgcccccgagaatggtccagcccccaaatatccacagtgctgaggctgagaaagtcgggtagagcggggagcacagcttggggtacaggtgagaggggaggtaggtgggaggggaggttggcaagcaagggagcacgttcatagatggaacagaaccaggaccctgaggaagcaggagagggaggggagcttgggtgttaaaggcatgagactcagacacagaccacagtaggtggctgcagtcaggttctcggaaagggtagaggtcacaaaatggctgaatgttggctaaaaatcctctgctgaaccccccttacagcatgcctgcgtcttaagccttcagtgcttgcttgcatacccccagtgatggggagctcaccccttattgggccaccattctggtgtctgggagggttgggggtgtggacagtatctgcagtcctgtctggcaccttttctgcaacaccaggacttcagacccattgggggtctctgcagaaaagcccacctcctaagattttggctgagtttgtgcccctggggaggccccagaggccccgggcagcatctcagcagtgcctctttgtactcgctcctagacctgatgcctgcacctgctgaccccacagccagggagggcctggcagccccacccaggagacttcgctctaggaaggtgtcctgccctctcacacgtagcaatggggacctggtaggtgagggggcgtggcaggagctggactgggggtcgcgtctggggtccgcttttgggcactggtcctggggcactcacagccaagattgtctctttcccttccagtctcgttccctgagcccctccccactgggctcttcagccgccagcactgccttggaacggcccagcttcttatcccagacaggacacggtatgtgagggcggtcctgggcctggctttgggcctcagtgtcaccttctctggtctgggtgggtggcttctctgttggcagaggtgtggttgggcggagggagtctcgagcctggagcctatattcacactgtctatccgttgttccccattccctctccaccacccccaggagtctcccggggtccgagccctgtggtcctgggctcccaggatgccctgcccatagccacagccttcacagagtatgtccacgcctacttccgtggccacagccccaggtacccagtgatgggcagacagggcccgtgggaagtctgtgttgggggagtccagcagggacagctttcagatgtgcttcatggtctgtcttatagtgaaagggccttgaacactgagccaagtgaccaggcccctgtcctgagggcagtggagccataggagggcctttttttttttttttttttttttttttttgagacagagtttcgctcttgctgcccaggctggagtgtgcagtggtgcaatctcgcaatctcagctcactgcaacctctgcctcccgggttcaagcaattctcctgtctcagcctcccgagtagctggaactacagatgcgtgccactgcacccgactaaattattgtgctttttgtttgtttatttgtttgtttgtttgttttgagacagggtctcactctgttgcccaggctggagtgtagtggcgtgatctcagttcactgccacctctgcctcctgggttcaagagattctcctgcctcagcctcccgagtaattctgggattacaggcacatgccaccacaccctgctgattttgtgtctttagtagagacagggtttcaccatgttggccaggctggtctcgaactcctggcctcaagtaatccagctgcctcagcctcccaaggtgctgggaggatagacatgagccactgtgcccagccataggagagcatttaagcagggctatgcattgctgtagacgccaaggctgccgtgggcattaagatgaagggagtaatactagaagttaggcccagtaagtgggtaagggcgtgggttagggacaagcggagtgcagggatatatattggggtggccttcagcagaaaagatctgaaagtcaaaccatgaagaagaggagagtgtcagatcaaaaacccaagcaaaggatagctaaaaaactgaacattttaatttgagcttcctggtggcctaggagaaaagagaactagggatggagatgttcctgcctccttcagcccagggtggattcttcctgtccaggcaggaatgaaagaggaggttgggggaaaggatacgggggatcatcagggccatcctcctagatccgaggagtctggggagccacaggcaccagtgaaaccaagagaaggggaaggatgaggcaccaggcagagccctaagccaacacccagtcccctcatcctccctagctgcctggctcgagtaactggggagctgaccatgaccttccctgctggcatcgtgcgtgtgttcagcgggaccccaccaccacctgtcctcagcttccggcttgtacacacaaccgctattgagcacttccagcccaacgccgatctgctgttcaggtactatggaggggcagtgggagagggcctcggaggctgctggggatcaggcttccggactctgagttccctctctgcttcctgggattttttcttttcttttttttttgtagagacggagtcttgctctgtcgcccaggctggagtgcaatggcgtcatctcggctcactgcaactccgcctcccgggttcaagcaattctcctgcctcagcctcccaagtagctgggattacaggcacgtgccactacacccagctaatttctttcgtattttagtagagacagggtttcatcatgttgcccaggctggtctcaaactcctgagctcaggcaatccgcccgccttggcctcccaaagtgctaggattacaggcgtgagctaccacacccggcttgattttttttttttaattattatttttttgagatggagttttgctcttgttgcccaggctggagtgcagtggcgtgatctcggctcactgcaagctccgccttccggattcaagtgattctcttgcctcagccacctgagtagctgggattacaggcatgtgccaccatgcctggctgatttttgtatttttagtagagatggggttgcaccatgttggtcaagctggtcttaaactcctgacctcaggtgatccacccgtctcagcctcccaaagtgctgggattacaagcatgagccaccacacccagccacctcctgggatttgctgtgtggcgtggggcaagtaacttgccctctctgacccttgttttccatccctcctttactgcccgcaccacaaccacccaggtagggctttgctgggcccagggtgggccaggaaattgcatctttaggaaggggtagattgaatgctgggagccctgggagggcatgtcccgaggattggggtgatcagtccgggtctctgcagtgacccctcccagagtgaccctgagaccaaagacttctggctcaacatggcagctctgaccgaagccctgcagcgccaggcagagcagaaccccactgcctcctactacaacgtggtgctgctgcgataccaggtgcgccacccgcatggggccgggaggaggtggtggagtgggggacacggtgagccggcagcagacatggaggcgcctgcgtgttggccaggctggtctcgaattcctgacctcaagagatccaatctgtgagagccgatgagctggagggagtaggcagtgtgggtcgggaatgaacggtggaggagtaggcagtgtggaagagcgtgcatcccctgttgcagatagtatgtttatgtgaactagaagcagcccagccccggaaccttacacttgaacttccctgggagactttgttagaatgaggcgctctcctgccccctgctggaaacctggtgtaatacagcctctcatccatcaaatctccctgtgactggacccccttggggcggtgcgtgcatcgcagggtcaaggtggttgaatagcgcatggtgtggcaagacaggatggcccaagctgtgtcctctctctcattctcattcttcctagttctcccgcccgggtccccagtctgtgcctctgcagctcagtgcccactggcagtgtggagccaccctcacccaggtctcagtggagtacggctaccggcccggtgccacggctgtgcccacaccactcacgaacgtccagatcctgctgcctgtgggggagcctgtgaccaacgtccgcttgcagccggctgccacctggtgagggcttgcgggaggccaaggaaaactcagcagtttcccccataaccccagaccttctccctgatgcattgattaaagggtgcaccctcggcctgaccgttaactgtgagcccaccctgcttagcactaagggtgatgttatgagtgccaggtgcagtggctcatgcctgtaattgcagtgctttgggaggctgaggtgggaggatcacttaaggccaggagtttgagaccagcctgggcaatatggtgagatctcatctctacaaaaaatattttgtttatttatttatttatttaatttatttactttgagatgaagtctcgctctgtcgtgcaggttggagtgcagtggcacgatctcagctcactgcaatctccgcctcccgggttcaagcgattttctctgcctcagcctcccggatagctgggattacaggtgcctgctaccacacccagctgatttttgtgtttttttagtagacatgaggtttcaccatgttggtcaggcttgtctcgaactgctgacctcaggtgatccacccgcctcggcctcccaaaggactgcgattataggcatgaaccactgcacccagccttacaaaaaaatattttaaaaagtagtcaggccgggtgcggtggctcacacctgcaatcccagcactttgggaggccgagatgggcagatcacgaggtcaggagatcgagaccatcctggttaatatggtgaaaccccgtctctactaaaaatacaaaaaaaaaatccgggcatggtggcgggtgcctgtagtcccagctacttgggaggctgaggtgggagaatggcgtgaacccgggaggtggaggttgcagtgagctgagatcatgccactgcactccagcctgggcaacagagtgagactccgtctcaaaaaaaaaaaaaaatagtagtggtagtgtgctcttgtagtcccagctactcgggaggctgagacagaaggatcacttgagcccaggagttgaggcttcaaggagttaccctgggtgacaactgtctcttaaaaaacaaaaatttaaaaaaaaaaaagtctgttgtgaagaagccagacttataggacagaatgcgtcatctaaaagtgctgcaaggaagccgggcatggtggcttatgcctgtaatcccaacactttggaaggccaaggcaggtggatcacctgaggtcagcagtttgagaccagcctggccaatatggtgaaaccccgtctctactaaattacaaaaattagccaggcgtggtggcgggcgcctgtaatcccagctactcaggaggctgagggaggagaatcgcttgaacccaggaggcataggctgcagtgagcagagatcgcaccaatgcacaccagccggggcgacagagggagacaccatctcaaaaaaacacacaaaaaaacacaaaacaaacacacacacacacacacacacagaagtgttgcaaggctgtgtggctccacggctgttccatatctcaccctcatttcacagatgaggaaattgaggtgaagtgggggagaaggtttgttggggtcacacagccaggaggcagctgaggcaggaccctgggctctcagcatcctctctggggaagccctgattaagattctttctctgccaggaacctggaggagaagcggctcacttggaggcttccagatgtgtccgaggcaggcggtgagctgtggttgtgtatgagggctgggtgggagggactggggtcaggtgggaggcacttatttatgttggggaagaattggggacatactgagggcgggcaagtatgggcattgaggaagtctttaaaagctggaggagggccgggctgagtggcataggtctgtaatcccagtgctttgggaggcccagaatgcaggatcacttgagtccagcagttggaggctgcagtgacccgtgatcgtaccactgcactctagcctgggcaatagagccagactctgactcaaaaacaaacaaacaaacaaaaaaggccaggtgtggtggctcacgcctgtaatcccagcactttgggaggccgaggtgggtagatcacttgaggtcaggagttcaagaccaacctggccagcatggtgaaaccctgtctctactaaaaatataaaaattagccgcgtgtggtggcacgcacctgtgatcccagctacttgggaggctgaggcaggagaatcgcttgaacccagtaggtgaaggttgtagtgagccgagatcgtgccactgcactccagccagggtgacagagcgagactctgtctcaaaaaaaaaaaaaaaaaaaaaaaaaaaaaagctggaggagggccaaggacagtggcataggtctgtaatcccagtgctttgggaggcccaggtgggaggatcacttgagcccaggagttagaggctgcagtgacctatgattgcaccactatactccagcctgggcaacagagccagaccctgtctctaaaaaaaaaaaaaaaaagctgaaggagagggcgtcccagggccagatggccagacacagcaggtgcaaaggccctgaggcaggactcccttgctagccatacaaagcccagtgatgccaggagagacagatgcaggggatcaaagggaggtctgatggggcacataaaggccacagaacagagggcttcaggtgtgggccaaagatgagcctggttcacagctgggacgggggctggtgccagggcgcagctgactgcaggtctccccaggttctggccgcctctctgccagctgggagccgctctcagggcccagcacacccagccccgtggctgcacagttcaccagcgaggggaccactctgtcgggcgtggacttggaactggtgggcagcggttaccgcatgtcgctggtgaagaggaggtttgccacaggtactccccaaccctgctgctgggtgacctcaggagccgagatcttacaggggcaagccccggggtgtggggagggattggggtgtggggatccttgggaaagataggtgggtgttggggccaggagaccccagatggggggcacaggtgggcaaggaggcagggccctgtgtatctggggctggcccttggaggacgtccttggaaggaccccagccagggagcccgaagtcccccctgccaccccctcctccagccccaccctgttctcctgcccccaacaaggggctcctggggcccagtggcaacagggactatgagttacaggggtgttttgaagaggacaaggatgattgaagcatcccagggtcagagccggggaacccctcccgtacccctcctccccacccctccccctcacagctgcacccccacagggatgtacctggtgagctgctgaacccgcaaatgctgctgccccagctctacactgcgccctggtgctggctgaccaccccctgccctcctgccggaccctggggcctcccaccccagcctccctgaggcccatactccacggagaggagccccatgcccagcctggctgagcccgagattcgctcctccccctcatgccaaccccacacaggtcccggccttttaatgttctttgaataaacactttattttctaataaaataaaaaaggaaaccttttcctgctccaggaagtatcctttgcgttgccagagaggggaggaagagaaggtggatggatacgagagacctaatgtacctccctccctgcactgcgctcaaccggtacagggccattctgggagagaaagaacaacacagataccccagccccatgggctcagaggtgggctatagggagggaggaggactacagaagcccagaaaggggtgtcaggagtcttcccaagcagtcaggaagactttctaaggagggggcattataaatgaggttttgaggtatgagtaggagtttgcaagataggaatgggcatcccaagcaaagtgatggaaggttgttagttcaatgaggaagcaattagtcaacctacaaatattaattgagtatctactgtataccatgtagcagagagagagctatgagcaggacaaagttcttggaacccaggaagtggagataggaagcctgagtgaggagcctgcttggcggccactggctgtgtgactttaagcacgggacttgagcctcagctcatctgcaactcacctcactggatatctgtgggaggtcacacacttagaagagtgccaactacagggcaaaacccccactagtaccaggcagctttgggagccccaggaggagggtggaccttggtgcaggtgtgcaagaatggcccactggggagggcaggacagaagcagtaacagcagactgcagtggggagcaggtctgagcccagtggacagtcttgggtcctgatggatattcagggaaccagggcccgtgttcctgaccttgaggctgtacagaccccagggagcaagcccagactggatgaagctcagaaggaaggaagtaggaggcaggatttggcctgagacttgctgtgcgctgtctctgatcatcccaccctgtcctccaaagagagagtgcctctggctgtgcgtcagtttccttgtctgtaagatgggaggaatcctgtagttgggagaggttcagggagcattcttggcacaaagcaagtgcataattaacattggctgagagtcgggcaccgtggctcacgcctgtaatcccaacactttgggaggccgaggcaggaggatcacttgagagcaggagttcaagaccagcctgggcaacatagcaagaccccctgtttctacaaaaataggaaaattgacccagcatggtggcacacgcctatggtcccagctacttgggaggctgaggcaggaggatcaattgaacccaggaggttgaggctacagtgagctaagatcacactggtgctctccaaggctctgggcagccacagagtgagatactgtctcttaaataggccaggtagggtggctcatgcctataatcccagcactttgggaggccgaggcaggtggatcatttgaggtcaggagttcaagaccagcctggccaacatggtgaaaccccgtctccactaaaaatacaaaaattagccaggcggtagtagtgtgcacgtgtaatccctgctacttgggaggctgaggcaggagactcgcttgagcctgggaggcggaggttgtgatgagcccagattgtaccactgcactccagtctgggtgacagagtgagaccctgtatcaaaacaaaacaaaacaaaaacaacaaaaacgtcagctgtaggaaggaaggatgattataggagttggggcatcaaatgggggcagaggtggctgcagcacctgccctgtctggctacaaacagcccagggacttcccagcccttcatgtcttctcccttgcaggtcttagcacctaggctgtaaattcagagaccacacctgcccagtgggtgtggctctgggtgtcagagagtagtggcatccatggggccactgggtgtcagacatccatggggccctgggtatcagagctgagctttatagaggtgacaaaatcaaaatctgtttgccaccacctcctcataatgtagcctaatctgggcatgggttcttccctgtctgataagtggcgggtacatggcacctcctagtagcttttatttgccttcctggggacacaaatgaggctgggcaccttttaaaatgaagaaggcatctgggcatggtgactcatgcctgtaattccagcactctgggaggccaaggcaggtggatcacttgaggtcaggaattcgagaccagcctggccaacatgataaaaccccatctctactaaaaatacaaaaataagccaggcgtggtggtgggcgcctgtaatcccagctattcgggaggttgaggcaggagaatctctggagcccaggacgaggaggttgcagtgagctgagaacatgccactgcactccagcctgggagacagagactccatctcaaaaaagaaaccaaacaaacagggctgggcgcattggctcacgcctgtaatcccagcactttgggaggcccaggccggtggatcacttgaggccaggagttcgagactagcctggccaacatggtgaaacccccatctctactaagaaaacaaaaattagctgggcgtggtggcaggtgcctgtaatctcagctactcgggaggctgaggcaggagaattgcttgaacccggcaggcagaggtttcagtgagcccagatggcgccgctgcactccagccttgatgacagagcaagactccgtctcaaacaaacaacaacaacaacaacaaaaaaaacaaaaaaacacaagcaaacaaaaaagcgcagaaggcacttttcccaggtgtggcctcctaactgcccagccttccagagcaggtgtgacgtgacctatctcagaagagtgaattccaagagagagggcgcggaacccgttaaacctgccaaccccgggcaggcgtgatgccattatgcagtttacatgccctggtctcttccacccgggtggccttaaaacctcagctgtggtacagagtgatccattggcacagcaccatcaactgggccacatgtcagaggccacccccagctgataagtggcctaattggattttcttttgagctgaaattcacaaaacaaaaaatgaaccactttaaaatgaacaattcagtgagtttcagtatattcataatatgtgcaaccacaccctttatctaatttgtgcacattttcatcccctccgaaaggaaaccctgtccccttcagcagtcatgccccatttcccctcccacagctcctggcaaccactaattagcttcctgtctctgtggatttgcctgttctgggcatttcacataaatggaatcatacgacatgtggccttttgtgtctggcttctttcactcagcatcgtgttttttatttcatccctgttgtagcagggatcaggacttcaatctcttatcaggacttcaatctctctcttttttttttttttttgagacagagtctcgctctgtcatccaggctggagtgcagtggcatgatctgggctcactgcaacctctgcttcctggatttgagcagttctcctgcctcagctccccgagtagctgggattacaagcatgcgccaccatgcccaactaatttttgtatttttagtagagagggattttgccatgttggccaggctggtctcgaactcttgacctcaagtgatctgcctgcctcagcctcccaaagtgctgggattacaggcgtgagctactggccaggacttcagtctttctgatggctgaaaaagactccaggcagggcacagtggctcacacctgtaaccccagcactttgggaggctgaggcgggtggattgcttgaggtcaggggttcaagaccagcctgggcaacatggtgaaacccccgtctctactgaaaatacaaaaagtagccgggcgtggtggcaggtgcctataatcccagctactcgggaggctgagacaagagagctgcttgaacctgggaggtggaggttgcagtgagccaagatcctgccactgcactccagcctgggtgacagagcgagactctgtctcaaaaaaaaaaaaaaaaacaaaaaaaaaaaaaactcaagactccactgatggaccacatgttgtttatccattcatccactggacacttgggtgggtgatcaccacccaagcagctgaaaagaacactgtgaatcatgctgctatgaacttccctatgcaagcatttgtttcaacacctgttttcaactcctttgggtagatacctacaagggcaatggcgggatcatagggtcattctagtccggatttgaacccgggccctccagcaccagaattcactctattgcgtccagtgaaccccggaagcacccggtttaaaaggtctgggggctcagggtatctgtatgtcttacacatgggaaaagggtgggagggttcagtttccctgggtgagtggggcggggctagagctcacatcctcccagcagcctgaattctggagggccagtacctggtggaggaggggatgggcggggaccctgtcacaggatggtacttttttttttttttttttttgagatggagtctcactctgtcgcccaggctggagtgcagtggtgcgatcttggctcactgcaacctctgcctcccaggttcaagtgattctcctgcctcagcctcctgagtagctgggattacaggcgcccgccaccacacctggctaatatttttgttttttgtttttttttttttgagatggagtctcactctatctcccagactggagtgccgtggcatgatctctgctcactgcaacctccacctcctgggttcgagtgattctcctgcctcagcctcccgagtaggtgggattacaggcacccgccagtatgcctggctaatttttgtatgttttagtggagacggggtttcttcatgttggccaggctgatcgcaaagtcctgacctcaggtgatcccctcactttggcctttggaaggtgctgggattaccggcatgatctgcccacttcggccttccaaaatgctgagattatagggttgagccaccccgcccgcccaggatgggacttttggttccggctccttcccggccgacaaatcccttcctggggccatgacttggtgaacccagggacccaacagggtgagcatagactctgaatcaaagtccaaggatgtaccacagtaagaaagtgtgtgcatccagaaccgaggccagtagtgccacatttgacactatgacatttccggtaattgccctccatacagttttaatcatgcatttgctctgagggttcactccccagacctctcccatccagagtacccaggggctatttcttacattttacaggtgaggaaactgaggcacagacaggccacatatacacctcggcttcctcctcgggaagaaacagggatgaaggaggaaggaggggtttcctgaaaccatagcccagctcacacacctggacttccccaaccccagagctcccaacgctgggtccaggctagaatctcctagagattcagaggcagcacagggcagggttcgaatcctagccaacccaaccctaaaaatctacaaatctgaggccaggtgcagtggctcacatctataatccagcaccttggggatctgaggcaggaaggtcacttgaggcccacagttaagaccagcctgggcaacatatcaaaaccccatatctagaaaaatgacaaaaattagccaggcatgctggcgggtgcctgtagtcccagctactcgggaggctgaggtgggaggattgcttgaactggggaggtcgacattgtagcgagcggagatcacaccactgtactctagcctgggtgacaaagcgagatcctgtctctcaaaacaagaaaaaaagaaaaagaaaagactacaaatctgtctgattgttgacttccagaacccttccaaatgccagcaggtggcatctggatgtctgggggcacatcgtaggttttcgggtcctggaattattttcaatatagagatggaatctcactatgttgcccaggctggtctcaaactcctgggttccagcgatccgcccccctcggcctctggaagtacaggagtgagccactgcgccgaccccagcttcaggaatctttgaactccccgcagagagcagaggtgccgcaaggtttaacctgcctccctccctccttatcgccatgggcttatccaatcatttcttcacggaacacacgtgggccaacgctgaccgggctctgtgccaggaacccgcaaggcgctgcttgttcatctccagccacggggagctcattccctagcagcgggccagacccaaggtggggtcgtgagccccgagaggggcgagggtggcaagagcgggatggcagaggtggcagccgggaccggagaggggaagaggcatggccggggagggaggagccggcagagaacttcgcctgggccaccaggaaactcagccgagctgggaagagggggactggcaagcggccaaggcggagggaggcaggaaggcgtgaggcccggtgggagggaggaagcgggagaggggcgggagctctggctcaggtaaaaactctttcttcggctcgcgagctgagaggagcaggtagaggggcagaggcgggactgtcgtctgggggtgagtgtcggcagcccccggaggatctggcggaccccagtggtgggggtttgggggtggggaagttgtggctctggagaagcccctgccggtctccaccgcgcataccctgcagatgtgggaacattcgggagccccgagtctcgagaacccggttgccctcacccatccgtaattgtctccggcgttcccaaggccagctcggacctgggtcggggaggaagcctcccccacagctggcgacccgggaccccggcgcccctcccagattgggcgggatcagacccccgaggcggatgccgcttagtcagacttggctgttactgttacctgtgttgttgagattattggccccttggttgggagtatctgggcaagccagcgctggggtccccggttgggtttgggaactgcaggtgacccccagtctctccctgcggttccggtgctgcaggccctgccaggtggctgggcggcattccaggggccctggctgcgtggcatggacacattgctgaaccggcctcagtttcccctccgtgaggtggaacaatgaaccagctgggatgaggatgcccgaagcgtttagtcaaaggaaatttttgtgatgaggtgtactgctggccactgggggcccttgcgtgactggcgttaggtctctgagcctcagtttccctgtgtgttaagggggggtctcatggcatgggaccttggcgaggatgagttgagtggataggagctgtggccactcagtgggtgcccagggacagtcagctgtcatcataattatattaattatgtctgtagccactgttcagattcactcctgttccaagaatcccgaccatcttttcctctgggtcagatttaaactttttgtttgtttgttttatttgtagaggtgggggactcactttgtcacccaggctggagtacagtggctccatgcactgtattcactgcagcctcaacctcctgggctcaagtgatcctcccacctcagcctcccgagtagctgggactacaggtgcacaccacaggcagctaattttaaaatttttttgtgtgtggagacggggtctcactatgttgtccaggctggtctcaaactcctgggcccaagcaatcctcctgccttggcatctgaaagtgctgggatttcaggcatgagccactatgcccagctctgatttttttaaatggacacttctcaagaggaaactgaggtcgcccctcaacttgggcgggggactcctgcagtccagatctgggattcagggcccatgggaagccacctggccgtctaggtctggggccagccctgggggccatcacttcctcccactggcctgttctcaaggtgacaccaggcagggctggtgtcaggaggaagaggtgtggcccccaggtcaggcagctgggcccccatatggcctaggtgagcagttgggtgtttgctcagtccagcctggacaccctccctcactctcacccctagggtgtggcatttcctggcaggtgctctgggtgtgggagaaccaaaagggggccttggtgcttctctgttccaggccagagttcaggaatccagacaagccaggtcagcccaggaggagcaagtaagggctcactgagtgacatttcctcctgccaccagcctctgaggcccagagcaagcaggaatttgctcactcccccaaccccatgagccagggaggatgcctattgtggaccctcttcctggtgggaatctggcttgccttgattgctcctcatgatggtgaggtcactaccaacgtggcaaactaaaggaaatctcatcagctgggagttaaagacaggaactaggctcccacccaacctttcttaggtggatttctaggcctctctgtgcctcaattttcctatccataaaaatggagctaatgcagccctacttctcagcacacatatagagtttagatggacagatggtggccaggctgcacacaggacctggcatattgatcctagtcctaattatgcagctcattatgttatcatttatagcatgtatctttgcacacagaaataatatcatgaatatttctgagctctaagtacaagacttggagaagagctctgaccagcctgaaggtgtgggggtccaggaagtccccagaggaggggcccaggagacctcagttcccccatcactcctggattgtgggaagggtctgaggttgaactgcgatgcacggcctggcttcccagcctgtttccccatctatggagtgagcccaaagatgccctttgagactccactgggccagggctggtgttattcaggggcccctttccagtctcacataggtgccccaggcagttcctgcaatggggtagggctggcatggatgacatacaattagtcatccatgacagagcctcgggacctagaaacccgggacaccaaagtctaaagtgcatgtgtcaccgtgcccaaccccacccctttttccatacccaggcactccctggtgcagatattgagtatatattgacagagaactcactagtacacatggtttcactaaagcagggtccggccattgtgaacttaaaggatttactgggctatttcttcttcttttcttccccttctgtttgcaaaagcaactcctgctccttgtaaaaagggaccagcctatcattactgggaaacccaaactggtaagaactggtgaggaaccacccacaggggctggcagatcagggttcaaatcccaccaacccgccctggcctcagtcggctgtgtgaccttgggcagagttgcaccctctctgcacagatcgtccacctggaccctaggctcccctctggaaggctcagtgagactcctcgggttcctccacaggccaggggctcacaccctctcctgcaagcgtccccaacttccaccctggagtttcttcacccctagaggttgcactcctctggaaaattgtcctgtttgccacttctctgtcccctgttagtggtgtatcagcgtcctgggcacacgagtgtttctctccatcatcttggctgtgtcctcggaacctagacccagatgtggcatacgctaggtgctcagcacttgctcagagcagtcacaactctgcaggtgataagggtggtggcagctgctattaaatctcattgtggctgggcgtggtggctaacacctgtatttccagcactttgggagaccgaggcgggtggatcacctgaggtcaggagtttgagaccagcctaggtgacgtggtgaaaccccatctctactaaaaatacaaaaattagctgggcatggtaacgcacacctgtaatcccagcttctctggaggctgagacaggagaatcgcttgaaccctggaggcagaggttgcagtgagccaagatagcaccactgcactccagcctgggcaacagagtgcggctctgtctcaaaaaaaaaaaaatctaattgtggctgggtgcagtggctcacaactgtaatccctgcactttgggaggctgaggtgggaggatcacttgagcccaggagttggagaccagcctgggcaacatagcgagacccatctctacaaaaatgaaattagccaggggtggtgatgcatgcctgtggtcccagctactcaggaggctgaggcaagaggatcagttgagccctggagttggaggctgcagtgagctatgatcgtgccactgcaccactccagcctgggtgacagagcaagatcctgtctcaagaaaagaaaaaaaaaatctcattgttggcgcttcacatatgtgccacttggagaaaaggccactgcttggagctaccacttgaccctctagcctttcccaggactcaaatccgtatgtagtcaaacgggattcttccagaagcttctctcaccctccacctcttgccttgccttttggcggcctcagaatgttccacacctccatccaaatcccaatttaggatgggtgagaattggagaaacagcggccacagcaatgctgatagtcaggtggtggttctgccaccattccagctttttttttttttttttttttgagatggagtctcatttacccgggctggagtgcagtggcgcaatctcggctccctgtaacctccacctcctgggttcaagcgattctcctgcctcaggctcctgagtagctgggattacaggcgccctccactatacctagctaattttttgtatttttagtagaaatggggtttcaccatgttggccaggctggtctcgaactcctgacctcatgattcgcccgcctctgcctcccaaagtgctgggattacaggtgtgagccaccgagcccggctgaccatcccagctttgcagaggaggatgctaaggtctgggtggccccagctactcggcccaggtcccatggaaggtcagtagctgggtcagaaggcccttcctcaacggctgtcgggggtccccatggctgcttcaaaggcatcagctcacagaccagtcctcccagctgcaggcaaggcagagactgagagccagcgaccaggctggttaggggtatccaggccggttaggggtatccaggcctgggagtccctgaagagcaatccagaagtagccctatctgggcctcagtttcctcatctggaaagtgggagtttcacagggagaattaccttaatgctatggagacctctgagtcagtgtcaggacatcccccgccccctgtgccactccccatcacctgtggtctccaaatagtcttgggagtgaggggggcagatctagccccaggtggtaccagcagggtccttgatgactttcacatgccccacatctcttgcagacagtgacaagaacagggttgagactgggcgcagtggctcactcctgtaatcccagcactttgggaggccgaggcgggcagatcacttgaggtcaggagttcgagaccagcctggccaacgcgctgaaaccccgtctttactaaatatacaaaaattagctgggtgtggtggcgcacacttgtaatctcagctacttgggaggctgaggcaggaggatcgcttgaaaccaggaggcggaagttgcagtgagccaagatcacaccactgcacttcagcctgggggacacagcaagcgagactctgtctccagaataaaaccaaagaaacagggatgagggcgacagaggtgcctggagccacttgcacctggggcaagggcccagccttgactgccccctgggagtggcagaggacatggggccagggtgcagctgccaatgcctacgattctgctgagcagacaacccttctgcatatttagtggtcattaattttcaatgagtcattaatacttagtatcacctgtgcattgaagcatgaatattcagtgaccatgaatatttggtatctgaagactgtttgtggcttgttaatattcctcatgatactattaggccgggcgaggtggctcatgcctgtaatcccagcactttgggaggctgaggtgggtggatcacctgagattaggagtttgaaaccagcctggccaacatggtgaaactctgtctctactaaaaatacaaaaattagccgggtgtggtggtacatgcctgtaatccctgctactcaggaggctgaggcaggagaatcacttgaacccaggagggtgcaacctccaggttgcagtgagctgagatcgtggcgctgcacttcagcctgggcgacagaggctctatctaaaatatatatatgtatatatatatattcctcatgataatattcaagtatcatgtatgtgacttgcaactttaaaaaaaattcagtatatttgggcacaacttgcaacttttcattattgctttgcaactattttgtatattacgaatagtaggcacctcctctgtagttaatggattgttaatgttcagtacttcactaacatgcagcactttttttgtttgtttgtttgttttgtttttgagacagggtcttgctctgttccccaggctggagtactgtggcgagatcatggctcactgcagccttgacctcctgggctcaagcgatcctcccacctcagcctcccaagtagccaggactacaggcgcacaccaccatgcccggctaatttttgtattttttgtagagatggggttttgccatcttgcccaaactcttgggctcaagtgatccttccttctcagcctctcaaacagctgggattacaggtacaagccaccatacccagctgttttttgtttttttgttttgagacaggatcttgctctgttgcccaggctggagtgcagtggtgctatcatagctcactgcagccttgaactcctgggctcaagcgattctcctgcctcagcttcccaagtagctgggactacaggtgcacgccaccacacctggctaatttttacactttttgtagagacagagtctcaccatgttgcccaggctggtcttgaactcttgggctcaagtgatcctcccacctcagcctcctgagtagctgggactataggcactcaccaccaccacaccaggctaattaaaaaaattttttttggctgggcatggtggctcacgcctgtaatcccaacactttgggaggctgaggtgggcggatcacttgaggtcaggagtttgagactagcctgcccaacatggtgaaaccccgtctctactaaaaataccaaaagtagccaggcgtggtggcacatgcctgtagtcccagctattcaggaggctgaggcaggataatcgcttgaacctgggaagcgggggttgcagtgagctgagatcatgccattgcactccagcctgggtgacctagcaagattctgtctccaaaaaaaaaaaaaaatcattgtagagacagggtcttgctgtgttacccaggctggtcttgagcacctaagctcaagtgatcctcctgcctcagcctcctaaagcactgggattacaggtgacttatcttgactgaatcacgggtgcccaaggcttactagtctcccaagctataaatctgtcttctgaggcagaacgtgtgcggcaggggactgtggctgctgcctcgtggagtgggggcgaggctgcagtgagataggaggtgatggctatcgtactttttcccttctgcaacaaactaggtagcatcctgtgggagcacagttgcaggagataagatgcccagccctggggcttcaggctggctgggcagatggacaggagagaagcgaagagatttcccatgtctgatggtggtgaatgctacagacatcagcagtgctggggctaggtgttttagcctggaggtcgaagcctctcggaggtgacatttcaggggaagcctaaatatgaagactacggaaagagctggaaaggaagggggtcctaggtggaggcagtggcaggtgcaaaggccctgaggcagggctgagcttgggtggtttttgtttgttttgagacagggtctcgctttgccaccaggctggaagtgtgatcacagctccctgcagcctccacttccagggctcaagtgatcctcccacctcagcctcccgagtagctgggactaaaggcatacaccaccatactcagctaatttttttacttttttttttaatttttagcacagacaggtctcccttttttgcccaggctggtcttgaactcctaggctcaagcaaccctcttgcttcagcctcctaaagtgcaaggattataggcatgagctactgcatccagcctgagcctgggtgttaaaggattttttttttttttgagacagaatctggctatattgcccaggctggcgtgcagtggcacgatctcggctcactgcaacctccacctcctggattcaagtgattctcctgcctcagcctcctgagtagctgggattacaggcgtgtgccaccacacctggctaatttttgtatttttagtagagacagagtttcaccatgttggccaggctggtctcaaactcctgacctcaggtgatctgccctccttgacctcccaaagtaccgggattacagacgtgggccacagctcccggccatgtttaaggaggctggtgcagctggagcagatgagtgagggcagagattgtgtgggaaagatggcagcagagaggacccacatcctgcagccacaccccaggcggtggcttctgggtcttggcaggggaaataaatggcttttctgtgcatttgaggaagtgggttctggaggatggcaaaatcgcactggcacgtgaagtgcaaacagctccaggcaggaccgactggtctggcagcgggcggccaggcgagggtccccaagagtcagcctggatgtcactgctggacactggtggcaccgtgtctggcttggggtgaagttttttcacccaccttgaacaggagtgcagggtaggcgctgtaacatgcagggaacatatgacaattgcctgttggcaccaggcatggtgactggtgcctgtggtcgcagctactcaagaggctaaggcaggaggatcacttgagcccaggagctggaggctgcagtgagctatgatcgccactgcactccagcctggacaacagagcaagtgagatcctatcactaaaaaaaaaaaaaaaaaatttttaattagctggcaaggtggcttatgtctgtaatcccagcgctttgggaagccaaggcaagaggattgcttgaggccaggaattcaagaccagcctggacaacatagtgagaccctgtctcttaaaacacagcacacacaatcaatacctgttgggccttcctggcttataggccatggtgtgccaacagctctcacctggataccagactgagcctcccactgcccagaggttcctcattctgctccttctggtccttctttttccaccccctaacatctggacatctgggctgtgatcgaaacattgatgactttcttcatcttattttccttttttttttcttttctttctttcttttttttctttttttttttttttttgagacagagtcttgttctatcgcccaggctggagtacaatggcttgatcttggctcactgccacctccgcctcccagattcaagtgattctactgtctcagcctcctgagtagctgggattacagacacgcaccaccacacccgggtaatttttgtatttttagtagagatggggttttgccatgttggccaggctgatctcgaactcctgagctcaagtgattgcctcggcttcccaaagtgctgagattacaggcgtgagccaccgtgcccagcttttttttttttttttttttttgagacatagtcttgctctgttgcccaggctggagtgcagtggtgtgatcttggctcactgcaacctccgcctcctgggttcaagcgattttccttcctcagcctcctgagtagctgggattacaggcatgagccatgagccaccacgccctgctaatttttgtatctaatattttgtatttagtagagacgggggtttcaccatgttggccaggctggtctcgaactcctgacctcaggtgatccaccactttggcctcccaaagtgctgggatgacagctgtgagccactgcacccagcccttcaccttattttctaaacctgcatactctcctataccccagcagccagcctctgtctaggccaccaaactcttccacctagatgttacccaatctccccccacccagcctcctgagtagctgggactacaggtgtacaccaccacactcagctaattttgtttcatttttttatttagcagagacagggtctcccttagttgccctgccctgactgaaatgtccctaatcccttagtgaccacagggatttttttttttttttttaatgacagtctctctctgttgcccaggctggagtggtgtgattatagctcactgcagcctcaaactcctggggtcaggcaatcctcccacctcaacctcccgcatagctaggactacaagtatgcatcatcacgccggctaacttttgtattttgggtagagatggggtttcaccatgttgcccaggctggtctcaaactcctaagctcaagcgatcctcctacctcagcctcccagagtgctgggattataggcctgagccaccttgcccagcccacaggggacttcttaaaggcataaatcaatctgatccctcccctgctcatagaccctccatggctcctcattgcttctcacaggaaacataagacattctttctggcgtgcccattctattcttgtaccctagcagggtcccataactccaccatcacctcctttctctcgccctgtcccaaccacgtcagcctcctcgctctgccaccagcaccctaaatttgtatccatctcagggcctttgcacatgctccactctgtctggaatgcccttccccacagtctgctcaagtgaattcccatcatccttcaggacctccctgatcctaggttgctcaggtcccctgtggacctgcctcagtaacaattagtatggctgtcactaattgttagtatcatttacaatttttttttttgagacagcatcttgctctgttgcccaggctggagtgcagtggtgtgatcatagctcactgcagccttgaactcctgggctcaggtggtcctcccacctcagcctcccaagtaactgagacctcaagcacatgctaccacagcctgctaattttttgttttgttttgttttgagacagagtctttctctgtcatccaggctggagtgcaatggtgtgatcatagctcactgcagcctccacctcctgggttcaagtgattttcctgcctcagcctcccgagtagttgggactacaggcacccatcaccatgcctggctaatttttgtattttcttttttttttttttgtagagagtgggtttccccatgttggccaggctgctgttgaactcctgacctcaagtaatccacctgccttggcttcctaaagtgttgggattatgggtgtgagccactgcgcccagcctaatttttgtgttttttgtagagacggggtttcaccatgctgcccaagctgttctacttattgttatattgagggcagggctggcttggtcacagctgtatccccagcatctagcatacagtaggtgctcagttaacactctagggctgatgagcactgtgacagttaacaggattggactcatgcacgttcacggatattcacctgtctgtgccccaggtggccgagagttggccaggttctctttgagggatgtttggtgccatccatgacgcagtcccttgtgacagattctgggaggccctgaggtgttggaagggagtctcccagtgaccccgagttgagggacgtatgagatgggcatactgcacccatcaaagttctgggttccggctggggacggtggctcatgcctgtaatcccagcactttggaaggctaaggtgggcagatcatgaggtcaggagatcgagaccatcctggccaacacggtgaaaccttgtctctcctaaaaatacaaaaattaactgggcgtggtggcgcgtgcctgtagtcccagctactctgaaagatgaggcaggaggatcgctcgtatgcaggaggcggaggttgaagtgagccgagattgtgccactgtattccagcctgggcaactccatctcaagaaaaaaaaaaaaaaaaaaaagtcctgggttctgatactgctccatgctgtaagtgggaatagctggggaatcaaggtagccaggatggtggactcatggtcactgaggcggtcaccacacagctaatatgcatcaagcccttttgcagtcagggagcagtggccccagtgtgtgtgtgtgtgtgtgtgtgtgtgtgtgtgtattggagcaggaacctcagcacccccatgtcctaataaggaaactaagacttcacacagaaaggcagggcacagtgactcatgcctgtcatcccagccctttgggaggccgaggcaggtggatcacttgaggtcaggagttcaagaccagcctggccaacatggtaaaaccccgtctctactaaaaatacaaaaaaattagccaggcatggtggctcacacctgtaatcccagctactcaggaggctgaggcaggaggatcgcttgaacccatgaggtggaggctgcagtaagcggaaattacaccactgcactccagcctgggcaacagaacaagagagagagagagagagagacgctgtctcaaaaaaaaaaaacaaaattaaaaaatttaaaaaattaatccccagcagggagggccagggcacctgtcagagccaacaggggttggagtgctttgaaatgggtcttgcaaggggtggaggagttaagtggggggtgaatttcaatattttgccaacctgagcaactgtacaggtgcaaccagatgttgggggccacaggaaaagcgctttgctcatggcgagtgttcagtgagttttgttttccacaggagccgcccaggaggctcctcaggccgaccccagaccctggctggccaggatgaagtatctccggcaccggcggcccaatgccaccctcattctggccatcggcgctttcaccctcctcctcttcagtctgctagtgtcaccacccacctgcaaggtccaggagcagccaccggcgatccccgaggccctggcctggcccactccacccacccgcccagccccggccccgtgccatgccaacacctctatggtcacccacccggacttcgccacgcagccgcagcacgttcagaacttcctcctgtacagacactgccgccactttcccctgctgcaggacgtgcccccctctaagtgcgcgcagccggtcttcctgctgctggtgatcaagtcctcccctagcaactatgtgcgccgcgagctgctgcggcgcacgtggggccgcgagcgcaaggtacggggtttgcagctgcgcctcctcttcctggtgggcacagcctccaacccgcacgaggcccgcaaggtcaaccggctgctggagctggaggcacagactcacggagacatcctgcagtgggacttccacgactccttcttcaacctcacgctcaagcaggtgcgctggactggggtcacctgatcggggccacctgtccttcttgtccaaattaccacccactcctgagggacccaggggaccagaagtcctcgtcagtccatcacagcccattctgcccctctgctgtcctcaccagcctcgtggagacccaaaatggtcttcttctaggagaggctagggggaagggcagaggagctaggttactagcacagagctcaagcctgatgatgcggattcgaatccaagctctgcctcttacttggtgttcgaccttggaggagttcattcacctctctgtgcctcacttttctcacctggaaaatgggatgtgaatgagtcccacccacctctaagggctactgtgaggtttacaggagatggagtttataaggcacccagaccagtgctggatgtccaactcaacttggcaatgacgggggacacatctccttgtttatttttatgtttatttatttttttttaatggagtcttgctctgttgcccagcctggagtgcagtggtgcgatctgggcttgctgcaaccacctcctggtttccggcgatcctactgcctcagcctcccaagtagctgggattacaggcactcaccatgcccagctaatttttgtattttgagtagagacggggtttcaccctgttggccagggtaatctcgaactcctgacctcaggtgatcttcccgcctcggcctcccaaagtgctgggattacaggcgtgagccactgcgcccggccaacatctccttgtttatttgttccggttctgtctccccatgaggctgggggccttgtctgtttcactcactgctgtgtccctaatgcctagaatagattcaggtgcacagcatgtgctcagtcaagacctttttgatggacaagaacccatgagaggtagctaggcttggtggctcatgcctgtaatcccagcactttgggaagctgaggagggaggatcgcttgagcccaagagtttgaggccagcctgagccacatagcgagacctcatctttttcaaaaaaaatttaattaattaatttttatgtttttttaattaattttttttttttggatggagtctggctctgtcccccaggctggagtgcagtggtgcaatctcggctcactgcaacctccacctcccaggttcaagtgattctcctgcctcagcctcctgagtagctgggaatacaggtgcatgccactatgcccagctaatttttttgtacttttagcagagatggggtttcaccatgttggccaggctggtctcaaactcctgacctcaagtgatcctcctgccttggcctcccaaagtgctgggattacaggtatgagccaccacgcacagcctcgtctctatttttttaaaaaaagaagccatgagaggtgagaaaatcctgcccatctgcagatgaggaaatggaggggctctaagaacccctcctaggtcctcgagtagagcaagacaagtagagacaacattttcaaggaggaacagggaactctgcaggttcctgctcataggaggtacagacaggcctgggttcaagtcctctggtagctgtttctctgcgggtgacctcactgcagttttctctggagagcctctgttccctcatctgtaaataagatagaggaccacttctgcctcctaagggtgcattcaggattcaaggtagggtaagcaccaagcacagcgcccggcaacaaacagatacccagcctgtgtaggttactgtaggggaaactgaggctgaggcgggtaggggccatggcctcttaacatgctgtgttctgaaaacacaaaagtggctaggcacagtggctcatgcctataatcccagcactttgggaggctgaggtgggcggatcacttgagaccaggagttcgagaccagcttcttgggaggctaaggcagcaggatcgcttgaaccctggaggcggaggttggagtgagttaagattgtgccactgcactccagcctgggtgacagagtgagactctgtctcaaaaacaaaaacaaaaaaccctttaaaagtgtgtgataaacatcagcttgacaaatatgaacccagcacccgtgaagcactggcactatgctgggtgctgagggagatggcatgaacagaaaagagagacacaggcccaaggagggaagtccagtgtttggtgggagagggggatgttaacaatcacacaggtcaggcacggtggctcacacctgtaatcccagcactttgggaggctgaggcaggtggatcacctgaggtcaggagttcaagaccagcctgaccaacatggtgaaaccctgtctctactaaatacaaaaaattagccaggtgtggtggtgcatgcctgtaatcccagctacttgggaggctgaggcagaagaattgcttgaacctgaaaggcggaggttgcagtgagccgagattgcaccactccactccagcctgggcaacaaaagcgaaaactccatctccaaaaaaataataataataataataaaataaaaatcacacaaaggccaggagtggtggctcattgcttgtaatgtcagcattttgggaggctgaggtgggaggatcctttgaggtctggagtctgagaccagcctgcgtagcatagcaagatcccatctcttaaaaaaaaaaaaattattagccaggagtaagtagcggcatgtgtctgtagtaccagctacttgggaggctgaggtggaaggatcacctgagcccgggaatttgaggctgcaatgaactatgatcatagcgctacactctagcctgggcaatagagcaagaccctgtctcagaaacaaacaaaattcatacaaatgattatttaacaacagggcttggccaggcagagttggaaggaatagcaatacatgtaaatgtaacaattttccagcatttcttggtgcttcatggagcatggtctccatggattccccaacactcctagaggcacatgataaggcctgtttggagagttgaaaccaaggcacagagagggtttcccaagtaaccccacagggcagggccttaacccaggctggattgtggacacttcctttcctgggcttagtgggctggagtggctaatagagacccaaggccaatttctccagccctcaagcaagcatgccctgtccaccctgcctgcaggtcctgttcttacagtggcaggagacaaggtgcgccaacgccagcttcgtgctcaacggggatgatgacgtctttgcacacacagacaacatggtcttctacctgcaggaccatgaccctggccgccacctcttcgtggggcaactgatccaaaacgtgggccccatccgggctttttggagcaagtactatgtgccagaggtggtgactcagaatgagcggtacccaccctattgtgggggtggtggcttcttgctgtcccgcttcacggccgctgccctgcgccgtgctgcccatgtcttggacatcttccccattgatgatgtcttcctgggtatgtgtctggagcttgagggactgaagcctgcctcccacagcggcatccgcacgtctggcgtgcgggctccatcgcaacgcctgtcctcctttgacccctgcttctaccgagacctgctgctggtgcaccgcttcctaccttatgagatgctgctcatgtgggatgcgctgaaccagcccaacctcacctgcggcaatcagacacagatctactgagtcagcatcagggtccccagcctctgggctcctgtttccataggaaggggcgacaccttcctcccaggaagctgagacctttgtggtctgagcataagggagtgccagggaaggtttgaggtttgatgagtgaatattctggctggcgaactcctacacatccttcaaaacccacctggtactgttccagcatcttccctggatggctggaggaactccagaaaatatccatcttctttttgtggctgctaatggcagaagtgcctgtgctagagttccaactgtggatgcatccgtcccgtttgagtcaaagtcttacttccctgctctcacctactcacagacgggatgctaagcagtgcacctgcagtggtttaatggcagataagctccgtctgcagttccaggccagccagaaactcctgtgtccacatagagctgacgtgagaaatatctttcagcccaggagagaggggtcctgatcttaaccctttcctgggtctcagacaactcagaaggttggggggataccagagaggtggtggaataggaccgccccctccttacttgtgggatcaaatgctgtaatggtggaggtgtgggcagaggagggaggcaagtgtcctttgaaagttgtgagagctcagagtttctggggtcctcattaggagcccccatccctgtgttccccaagaattcagagaacagcactggggctggaatgatctttaatgggcccaaggccaacaggcatatgcctcactactgcctggagaagggagagattcaggtcctccagcagcctccctcacccagtatgttttacagattacggggggaccgggtgagccagtgaccccctgtagcccccagcttcaggcctcagtgtctgccagtcaagcttcacaggcattgtgatggggcagccttggggaatataaaattttgtgaagacttggagatctttttttttttttaagcaaatttacaagtttcaacagacaagtccacattcatccctaaaagtctcattttccagtagaaaatatacactggtaaaaacggggcatggggccgtggctcagggctgtaattctagcacattgggagaccaaagtgggaggatcacttgagcccaggagttctggatcctgtctctgcacaaaataaaaaattactcaggcgtggtggtgctcacatgcctgtagtcccagctatacttgggaggctgaggcgagaggatcgcttgagcccaggagttggaggctgcagtgaaccatgattgcgccactgtactccactgggcggcaataagaagacaaaaacataaaacaggacatgtgtgaggcaaaagctgcaggaatttctatcaggcagatctgacctcatcccacccaccccctgctcagatacccttcatagctccttattgctttcagctcataaccccacatatccccacagacagattctttttttttttttttaagacggattctcattctgttgcccaggctggagtgtagtggcgtgatctcggctcattgcaacttccgcctcccagattcaaacaattctcctgcctcagcctcccaagtagctgggattacaggttacaggcatgtgccaccatgtccagctaatttttgtatttttgatagagacggcatttcaccatgttgcccaggatggtctcaaactcctgacctcaagtgatccacccgccggcctcccaaagatgctgggattacaggcgtgagccacagtgcctggccagccaaagatagattcttgcttccaggttgtcagcagacttaggagcgggaggtacagggtgagatgctcttagctggattggatgctgggcccaccttggcctcctgcttccagcaaggccccctctgaataccatcccagccaccagcagcctccctctccttaccaggcttgccttccctggttggaacctcagatctactgctctctgtagctcatcctttcctcccctcctcaagtgcttattatgcacctgccatgtgctacacgccttgccctgtactcctcctccctcctgtgggaagggtcagctgatacagacccaccttatggtgaggaaacaaacctgaaaatgatcaaatgggaagttcccgggagcaataagagctttgagcagaatttttttttaaattttattttattttatttatttttgagacagagtctcgctctgttgcccaggctggagtgtggtggcacaatctcatctcactgcaacctctgcctcctgagttcaagtgattctcatgcctcagcctcccaagttgctgggattacaggcatgcgccaccacgcctggctaatttttgtatttgtagtacagacagggtttcaccatgttgtccaggctgatctcgaactcctggcctcaagggatccacctgcctcagcctcccaaagtgttgggattagaggcataagccactgcaccagcctgagcagaatttaaatgggataacagggccaaacacagtgactcatgcctataattccagggctttgggaggcagaggtgggaggatcacctgagcccaggagttcgagaccagcctgggcaacatagcgagaccctgtctctacagaaaaaaaaaattagcccagtgtggtagtgcccacttatggtcccagctactcggaaagctgaggtgggaggatcacttgagcctgggaggttgaggttgcagtgagccaggaccatgccactgcactccagcctgggtgagagggagaccttgtttcaaaaataaaatgaggctgggcatggtggctcacgattgtaatcccagcagtttgggaggccgaggtgggcggatcacctgaagtcaggagaccaagaccagcctagacaaggcgaaaccccgtctccactaaaaatacaaaaattagcagagtgtggtggcatatgcctgtaatcccagctacctgagaggctgaggcaggagaatcacttgaacctgggagacggaggttgcagtgagctgagactgagccactgcactccagcctgggcgacagagtgagaatctatctcaaaaaaaagaaaaaaaaaaataggccagccgtggtggctcacacctgtaatcccagcactttgggaggccgaggtgggtggatcacaaggtcagaagattgagaccattctggccaacatggtgacaccccgtctctactaaaaatatgaaaattagccaggcgtggtggtgtgcacttgtagtcccagctactcaggaggctgagggcaaaagaatcgcttgaacccgggaggcggaggttgcagtgagccgagccgagatcatgccactgcactccagcctgggtgacagagtgagactcagtctccaaaaaaaaaaaaaaaaaaaggtggttaaaaatggctgctctggggactggagggagttgggaggatgagacaccatcctgcaaatcaggcctggatgagatggggctgcagggctttctgacaggcacatctgacctcattctgcccctgctcacacagcctctgtggctccctattgccatcaggggagagtcccagctcccctgctccactggattgagtagtgtctggcaagaattcatgtctgagaattcatattcatattctgagaattcatattctgagaattcacctcagaatatgggcttatttggaaatagggtctttatagacagacatgaggttatcatggattagggtggaccctaaatccgatgactgggccaggcacgtggctcatgcctgtaatctcaacactttgggaggccgaggtgggcggatcacctgagttcaggagttcaagaccagcctggccaacatggtgaaaccccgtctctactaaaaatgcaaaaattagctgggtgtggtggcgggtgcctgtaatcccagctacttaggaggctgaagtgggaggatcacttcagcccaggagttggaggctgcagtaagctatgattgtgccactgcactccagcctgggtgacagagtgagaccctgcctcaaaaaaaaaaaaaaaaaaaaagactaatgtgttttgtgatgatcattttctgacatttgttttgtgtctaatgtctaccattctaagtcctcaatgctaaggactcccatgggccttggtagagacctcggttcaagtcctgcacttacccttccctgtctgaccttggcaagcagccctctccctgggcctcagtttccccactttgcgttgcaatgcctctctagttatcaagctcctggaagtgccggtgggtccatggctgctgggggacaagcccacacagggactgactgaggcttgtccctttttctagagaaaatgcaggaagctgctttgggtcgtttatttactaagagacagcaagaaggggtgttacacatgcagggagcggagcgtctggggctcccctggagtgaggacatttggctgtcagtgtccagcatctgtgaaagcggggatcctccaagccagggctagggtgtgatttattctgcagttgactccacaggctgcaggtggcattggtctggggtagatagtgagcacccatcccaggaggtaatcaaaggcctgtagatgcgagactttatggtgctgtgtggcctcaggagctcaccagaccagaccctctgggcctcaggccactctgaggctgcacccaaggaggaatcagtagggacagagggtcagcaggtcttgttgggtacagccactgaggcagcagtagcgtgcagggttggtggcagctgcacggtggtggcggtgatggtgagaggtctggggcaggggctgcaggccaggtcccagcgtgagattactgtcggccaccagcccatggagcagatgtcgtctctccagccactgtagcaactcacctggggacagagtgaaactcagctggaacggaaacgacagaggacatgctaccccatgctgcatgtgcacgaatccacacacatcccactgagtaacccaccaaacactcatgcatgcagataaaaagtgagcactggccgggtgcagtggcttacacctgtaatcccagcactttgggaggccgaggtgggcggatcacgaggtcaggagtttgagaccatcctggctaacacagtgaaaccccttctctactaaaaaaaaaaacaaccaaaaaattagccgggtgtggtggcgggcgcctgtagtcccagctactcaggaggctgaggcaggagaatgacgtgaacccaggaggcagagcttgcagtgagccgagatcacgccactgcactccagcctgggtgacagagtgagactctgtctcaaaaaaaaaaaaaaaaaagtgagcactggcccggctcagtggctcacgcctgtaatcccagcactttgggaggccgaggtgggtggatcacttgaggtcaggagtttgagatcagcctggccaacatggtaaaaacctgtctctactaaaaaatacaaaaattagtcaggcgtggtggtggacgcctgtaatcccagctactggggaggctggggtgggagaatcacttgaacccaggaggtggaggttgcagggagctgggatcatgccattgcactccagcctaggtgacaagaatgaaactccatctcaaaaaaaaaaaaaaaaaaaaaaagcgagcacttattaagcacctactgtacgccaggcacctggttaatcctctcatccactcaactcatgtccacactcacatccccagctgcgtgggtccccatatgccacctgagtgccccatgccctgcccagggagtgtcgggggtcttggagctacagatggtgtcagtttccccaacaggtccaagggtccgtgagacacccagagcaggtcagagacccacccacagactcctcgtggtacagagacatgcaggggtgtacatgtgtctgtgggtccacttcctggtcacccacgcatgtgtggtggacccacagacacacacacacccctacgaggacacacccttgcagaccacctcccctggatccctaacaccgcaagtggagtggcacacagagacatgtggacacgtgttaacacatctgcacaaacttgtcgtatatccctgcaccagggccaggactagggtacagacagggaggcacgaagccatcaggatatttttttgaggccaggcaccgtggctcacacctgtcatcccagcattttgggaagcctaggtgggtgcgttgcttgagcccaggagttcatgaccagccttggcaatacagcaaaacctcatctctgcagaaaatacaaaaattagctgggcataattctgcatgcctgtagtcccagctacttgggaggctgaggtgggaggatcgcttgagcctgggaaggcaaggctgcagtgacccgagatcgtgccactgcactccagcctgagtgacagagcaagactgtctcaaaagaaaaaaaaaaggacttatgaaaatttagagggttgtttaccctctacccaatctgcagtttacaattgacaccagtggttctcaaaccagggtgattttgtttccaggggatacttgtctggggacagttttagatgtcacaacttggatggggtgtgaggctattcatggcattagggggcagaagacagagatgttatctaacaccctacaatatacaggacagccccactaccatatacatccccaaatgtcagcatcagctttttttttttgagatggagtctcgctctgttgccaagctggagtgcagtggcgtgatcttggctcactgcaacctccacctcccgggttcaagtgattctcctgcctcagcctcctgagtagctgagactacaggtgtgcgccacaacgcccggctaatttttgtatttttagtagagacgaggtttcgccacgttggccaggctggtctcaccagcctgagagtagctagtcacagctactcaggaggctgaggtgggcagattgcttgagtctgggaggcagaggttgcaatgagccgagatcacgccactgcactccagcctgggtgatagagtgagaccctgtctcaaaatatatatatataataataataatattaatatttttcccttttttgagacaagggtctctgtctcaggctgagtctcatattgcccaggttggtctcaaactcctggcctcaagtgatcttccctcctagcctcctgagtagcagggattacaggcatgagccaccacatccagcaaggtaagtattttaatgcaatacttttaaaataaaatttaaaatatttgtaaaaaggccaggcacagcggctcacgcttgtaatcccaacactttgggaggctgaggcgggcagatcacctgaggtcaggagttcaagaccagcctggcccgggcacagtggctcatgcctgtaatcccagccctttgggaggccgaggcaggtggatcacgagatcaggagattgagaccatccttgctaacatggtgaaaccccatctctactaaaaatacaaaaaatttagctgggcttggtggcaggcgcctgcagtcccagctactcaggaggctgaggcaggagaatggcgtgaagccgggagacggagcttgcagtgagccgagatcacaccactgcactccagcctgggggacagagcgagactcaatgtcaaaacaaaacaaaacaaaacaaaacaagaccagactggccaacatggtgaaacctgttgtttcacctgttcacctgtctctactaaaaatacaaaaaaaaaaaaaaatcagctgtgcatggtagtgggtgacctggggagtggcctgtaatcccagctacttggaaggctgaggcaggagaattgcttgaactcaggaggcggaggttgcagtgagctgagatcgtgccactgcacttcagcccgggtgacagagcgagactccatctcaaacaaacaaacaaaatacaaaaattagccaggtgtggtggtgcgtgcccgcagtcccagctactctggaggctgaggcaggaaaattgctggaacccgggaggcagaggttgcagtgagacgagatcacgtcacagcactctggtttgggtgacagagcgaggctatgtctcaaaataaataaataaaaataaaataataaaataaagtaacataattgtgaaaagcaatacttttcaaaagcaatacttttaaatacttttaaagctggacacagtgactcacatcgctaatcccaacactttggaaggtcaaggtgggaggattacttgagctcaggagtttgagaccagcctgggaaacagagtgagactccctctctacgaaaaagaaaaaaaaattagctgggtgtggtggcagcacctgtatcccagccactccagaggctgaggcaggaggatggtttgagcccaggaggttgagcctgcagtgagccgagatctcaccactgcactccagcctgggcgtcagagtgagaccctgtctcaaaaaacaaacaaacaaagcaaaattaaggcaaaaattcatgaagatcaaaatattgaaattttaagacaggatctcaccatgtacttgcaagagcctacctctcctgcctcactctgtttctggcccctcagggggactcatgctctgaggactttcttttttttttttttttgagacggagtttcactctgtcgcccaggctggagtgcaatggcatgatatcggcccactgcaacctctgccttccgggttcaagcgattctcctgccttggcctcccaagtagctgggattacagatgtgcatcattatccccggctaatttttttaaaaattatttttagtagagatggggtttcaccattttggccaggctggtctcgaactcctgacctctggggatccacccgcctcagcctcccaaagtgctgggattgcaggcgtgagccaccacgcctggctaacggctctggggactttcacacgcgcgttcacacacactccagtgcggacccacgatctgtgcacgcagccggcaggtgagccctgggcacatgcatgcaaacctgcccacctccctgcacgtgtgcatctgcgcctacgtgcacctgccccacctcggcttcccagagcgctgtccctgcccgtccccactcacggtcgcctccggtcgcaggcctcctggcttcggtggaccagcgggggcccccgcacacgcgcactagcgcgcgtacgaagtggtggccgcacaacttctcacgcatctctggggtgggcgcggggcccaacgcgaacaccagggcagggcccagcagcaccagcgcccaggcgggcagacgggggtccatggtggtgggtggcgccggggccaagcggggaccccctttataggcgcctgggccgtcccagctgggggccttggagaagggacagaacattcttcaggaccgcccaggaaaaaggtcaagggtggggttagtgccagagcctttctcccagggccagggccttggatgtacttctcccagagggagcactgggcaacgagtctttcttttttatttttttcttctttttttttgagatggagtctcactctgtcacccaggttggagtgcagtgacttgatctcggctcactgcaacttctgacacccgggttcaagcgattctcctgcctcagcctcctgagtagctgggattacaggtgcgcaccactatgcctggctaatttttttttttttattttttatttttagtagagactggggttcgccatgttggccaggctggtctccaactcctgacctcaagcgatccatctgcctcggcctcccaaaatgctgggattacaggcatgagctgtgcctggactattattatttttattattattattgagacaaagtcttgctctgtcttccaggctggagtgcagtgatgcgatctcggctcactgcaacctccacctcctgggttcaagtgattctcccacctcagcctcccaagtagctgggattacaggtgtaagccaccacgcccagccacctatttttattttttatttttgagatgagttcttgctctgttaccctggctggagtgcagtggcacgatatgggctcactgccacctccctatccctgactcaagcaattctcccacctcagcctcctgagtagctgggactacaggcccacgccaccacacccggctaattttttgtattttttttgtagagatggggttttgccatgttgcccaggctggtctcaaactcctggactcaagtcatcttcccgcctcagcctcccaaagtcctgggatcacaggcgagagcgaccacaccagggtatttattcatttttgacataggatctctctgggttggcctgtaatggcaggatcatagctcactgtaacctcattcccctgggctcaagcgatccttcagcctctgcctcctgagtagctgggactacaggcctgcaatacaatgcccagctaatttttaattttttaatttttatttttatctttttagacagagtcttactctgtcacccaggctggagtacagtggtgcgatctcgactcactgcaacctttgcttcctgggttcaagcgattctcctgcctcagcctcctgagtagctgggattacaggtgcccaccaccaagcctggctaatttttgtattttttagcagagacggggtttcaccatgttggccaggctgatctcaaactcctgacctcaagtgatccacccgcctcggcctcccaaagtgctgggattacaggcgtgcaccaacgcgcccggccatttttaattttttaattgtagaggcaggggtcttgctatgttgcccaggctcatctagaactcaagtggttctccctactcggccttccaaaatgctgggattacaggtgtgaggcaccacacacggccaagtcttcgctattgtcttaaccagtttaaagagatgaaatagatcaactgaaaagtaataatcctgccttttctggggggcaggggggaagacagcgggcatcttccaagaccagaaatgttcagaattttgttgtttctattactgtacaaatgagaaaactgaggcacacaggccaggtgcagtggctcatgcctgtaatgcaagcactttgggaagatggggcaggtggatcacttgaggtcaagagttcgagaccagcctgcccaatatggtgaaactctgtctctactaaaaatacaaaaattagccagatgtggtggtgcatgcctataatcccagctactcgggaggctgaggcaggagaatcacttgaacccaggaggtggagattgcagtgagccgagatggtgccgctgcacaccagcctggggacagagactccgtcccctcaccagacaaaaagaaagaaaagaaaagaaaaaaagaaaactgaggcacagagaaaggaccccaaacttgcccaaggtcacaggaggctgagcagagcccaggtcttctcaaggcgcctgacacgcagggctgggggtgtcccatccgaagctctgtctccccaacacggttgtcccctctgggtgagcaggggctggtggacccagaatagagcaggatttatttgttcagtggatgcttggcccccgcttcatgcctagggggtcttatagctttgtttttccaaggagggaatctgaggttgagagagggaaggatgcttgaccctaggcaggagagaacctgggctggaactcgagtcttgcttgaccccagagcagctccctccctatttctaccaaattagggggccctctggggctaagagagcagggacagggatctctctctctctctctctctgagtctctctcggccttcatctctcagtttccttctgtatgtctgtctctgtccgcatttttcttttttttgaaacggagtcgctctgtcgcccaggctggagtgcaatggcatgatctcagctcactgcaacctccacatcccagtttcaagcaattcttctgtctcagcctcctgagtagctgggattacaggcatgtgccagaacaccaggctaatttttgtatttttaatagagacggtttcgccatgttggccaggctgatctcatactcctgacctcaagtgatcctcctgccttggcctcttaaagtgctgggattacagacgtgagccactgagcctggccactctccacatctttctagcagttatgaggtgcacatgacgggggccggtcggtggggaggtggtccggccccagtgatgctggtcccctccccacagcctcgctcccccaacctggccttgtcctctgaccaccgggagagcatcctgttccttccccacccacagagagcctgtaatcagctcccccaggctgcagccaaggccagcagctggggctgggagtgagggggctctgtccttgagggccccagccaagccccacccagtggtcctcctccaccagcctgccctggggcccccacagtggctccctgagaggtctctggcccacagctctaaccgcatccctcccagctcacacaccctctgaggctccccatcgccccaagtccagcacaaaatcttttccactgaattcctttattcagtcaacaaacatttccagagccccctctgtactgaggcctcagcccagcccccaaggaaccctgaggtcaggggagacagctggacacagacacttccccagccccagggccagagtggggctggagggaaggacagggctacagtagtagtgggggtatatgagggaaggctgcaaggatgtggtagctggagttttgagagatggataagagttttccaaggaggcaaaagtggcagaaaagctttgcaggtgaggaggagcagcagaagcttaacctgcatgagaatccctctcaccagtcagaaagttgaccctgcacagccaaggggtaagctctgaccattttgcaggggacagaactgagacccagagagggaaaggaacttgcccactgtcacactgcatggaaggggcaaaactgtaggctccaatacttgggctcttaacctccttactctgagccttctcacgcttggcatgctgttccctctgccaggaatgcctttccttcccttgattgcgtgaaaagttcctgccaggtttggtgtcatccctttgtgccccttgtagggtgaggacagaaagggtcccattggacaggtgggaaaactgaagccctaggacactcagataccattagggtggactgggaccccagcctttcctgccccctttcaggatcccaaagagatacacgggctcccctaaaaggcagagtcccagccacagcaactgctcttgtccttggcttcctccagagaaacagagatcggggagcagaagtcagatcatacatttaaagctacatgagggccgggcgcagtggctcatgcctgtaatcccagcactttgggaggccgagacgggcagatcacgaggtcaggagatggaaaccatcctggctaacaaggtgaaaccccgtctctactaaaaatacaaaaaattagccgggtgtggtggcgggcgcctgtagtcccagctacttgggaggctgaggcgagagaatggtgtgaacccaggaggcggagcttgcagtgagcctagattgcgccactgtactccagcctgggcgacagagcgagactccgtctcaaaaaaaaaaaaaaaaaaaaagctacatgaatgtccccattggaaataagacaggaaactcaaaactaggtgctgtagtcccagctatttaggaggataaggcaggaggatcactgtagcccaggagttcaagaccagcctgggcaacgtagcaagatcctgtctcttaaaaataataataataaatttaaaaaaaaaaaagcctgggtgcagtggctcatgcctattattccaacactttgggaggctgaggtgggaggatcacttgaggttaggagttcgagatcagcctggccatcatggtgaaacctcatctctattaaaaataaaaaaaattagccgggtgtggtggtgcacacctgtaatcccagctactcgggaggctgaggcaggagaatcgcttgaacctgggaagcagaggttgcactgagccgagatcgcaccactgcactccaccctgggtaacagagcgaggctctgtctcaaaaataaaaataaaaataaaaaaaataaaaagagagagacagaaaaggaaactcagggggccagggcttaaggggttgggaagatgcgagagtcttaaatttggttccttgcttctttgggccaggactcagagagccccactgacacatatgcccatctgtcttgaaccttaacaaattgcaaaggccacaggctattctacaggccacgggagcccccccaaatgcaatgtcatgggggtgttcctgaagtagaggaccctcataaggcctctgaggcccagagaggggcagctccgggcctaaggtcacacagccagtcaacagagacctaatccagaggtctgcgggcaggagctatgaaaaggacagggagtggtgtttgccctctgggtgagcagtgaaggcatgagtctcacacccccggcttccgctccacagcatgtccagctgggggcccagggcgctgaatgatggccggtcctgtgggctaggggcccagcacagcttcatgagctcgtgaacctgaggggcgggggacagataatggggtcgtgcctgagcagtccaaaggacacaactcccattcagcgtatttgtttttgtttttttgagacggagtctagctctgttgtccaggctggagtgcaatggcatgatctcggctcactgcaacctccgcctcccgggttcaagcaattatcctgcctcagcctcctgagtagctgggattataggcacgtgccaccacgcctggctaattttgtattttgagtagagacagggtttcaccatgttggccaggttggtctcaaattcctgatctcaggtgatccacctgtcttggcctcccaaagtgctgggattataggcatgagccaccgcactcattcagttttaaaacacaaattaaattccatcccatctctgctccaaaaactcccatggctccctatggatcttacttatttatttatttgagataaagtttcgctcttgttgcccaggctggaatgcagtggtgcgatctcggctcactgcaaaccctgcctcctgggttcaagcgattctcctgcctcagcctcccaagtagctgggattacatgcacacaccgccacacctggctaagtctgtatttttagtagagacggggtttcaccatgttggtcaggctggtcttgaactcctgacctcatgtaatccacccacctcggcctcctaaagggctgggattacaggtgtgagccaccgcgcccagcccttatggattttacaacacacttctcctttcgagactaccctgaccaacatggagaaaccccatcttaactaaaaaaaaaaaaaaaaaaaaaaaaaaaaaaaaaaaaaaaaaattacaggtggcgtgtgcctgtaatcccagctactcgggagtctaaggcaggagaattgcttgaacctgggaggcggaagttgtggtgagccgagattgcgccattgcactccagcctggccaacaagagcaaaaccacgtctcaaaaaaaaaaaaacaacaaaaaaacaccacctctccctgatgccctccttcgctcatctccatccctccttccctcatttgttccgggcagtcacatctgcctccatcgcactggtgcttaaaggcacccagctcattacctccccaaggcctttttcccttccgtgtcctccactggaaatttcttctcctagctttactcatgggtaggctcctcctccttccagcgtcggccccgtaagaggccctctttgaccacccccaccccaccatttccctctgttcatctctttcaaggcacttatcactaccataattttgtctttgttttgttttgttttgttttgttttgttttgttttgttttgttttgagacagggtgtcactctgttgtccaggctggagtgcagtggtacaataatggctcactgcagccttaacctcctgggctcaagcaatcctcctgcctcagcctccctggtagctgaaaccacaggtgcatgtcaccacaccggctattgcttgtattgtttgtagagacaaggtctcactatgttgcccaggctggtcttgaactcctgggttccagtgatcctcctgcctcagcctccctagtagctgaaaccacaggtgcatgtcaccacaccggctattgcttgtattgtttgtagagacaaggtctcactacgttgcccaggctggtcttgaactcctgggctccagtgatccttctgcctcagcctcccaaagtgttgggattataggcatgagccatcgtgcccagcctagaatgttcttatcagattttgctagttactgggaggacagggtcttcagcacccaacaagtcctggcacacagttggcactcaataaatgtttttggcctgagcaaattaatttatcaatgaccaactgcatgtcagacacttccacaaaggttatgattatatgattataaaccatgagagggtgggatgtggtggctcacgtctgtaatcccagcactttgggaggccgaggcaggaggatcacttgaccccacgagctcaagaccagcctaggcaacacagagagaccccatctctttaaaaaaattttttaaaattagccaggcacagtggcttatgcctgtaaatctcagcactttgggaggccaaggcaggaggatcgcttgagcccaggagttcaagaccagcctgggcaacatagcgagaccttgtctcttaaaaaaattatttttatcttatttgtttgtttatttatttatttatttattttgagatggaatcttgctctgtcgcccaggctggagtgcagtggcatgatcttggctcactgaaaccttcccctcccaggttcaagcaattctcctgcctcagcctcgcaagtagctgagatcacaggcacccacacatgggtaatttttgtatttttagtagagacagggtgtcaccatgttggccaggctagtctcgaactcctgacctccggtgatctgaccgcctcagccttcaaaagtgctgggtttacaggtgtgagccaccacacctggccaaaattatttttaaattagccaggcatggtgatgtacacctatagtcccagcactttgggaggctgaggcaggagaatcgcttgagcccacgagttcaagaccagcctgggcaatatagtgaggctcccatctctaaaaaattatttttaaattagccaagtgtggtggtgtacacctgtagctcctgctactagagacactgaactaggggaatcacttgagctcaggagttggaggctgcagtgagctataattgcaccccagcctgggcaacagagtgagcccccatctataaaaaagaaagaaagaaagaaaaaaaaaaaccatgaacgtcaccaccatttatggagcatcgactgtgtgctcggctttgagctgagccctcataggcacaggtgttcaggagtctaatcttccctcaccctataaggcattactattctcattttggaaaagggtaaactgaggctctgaaagtgctctgacttgccacacagtgagagagtagccaagtgggggccaggatcctcatcggcctcacactctagcctttcttctcagtacagagactcaggcgccagctggcttgcccgagaccccggcccaatctacagactgggaaactgaggctagccctgcggcgctcacctcagcagggcaggcaggaggcgccggcagcctctggccctcctccagcagttccaagaggcggcagagggcggggacatcccgctcacatcccatcatccgcaggaactcctggagccaaggaggagcgcatgtggtgggggaggagcctccgtgggtggagggggaggggccacccgtggtgggggtaggggccatctgtgatggagcggggaggggctgcctgaaccgtgaaggggtcagaaaggtgaggaagcgtcctccccactggggcctatgatgctgggaccaggtgaccccatgctaaagagggacgcaggcgcagacaggttggagattggccacgaggggcgtggagggagaagaaggctgggggctctgggaagccgactcacggccgaggggctgcagcttttgtcgcagtaggtgaagagctcgtacaggacgaccccgaagctccagacgtctgactggcgagagaagatgttgtccgagagggattcgggggcatacctggagaggggacaaggtcttgagatgcgagggtgtagaaaggacaggaagaggggggcagccttggaatggggaactggtcagggtaggtggggactgtgagcaggtcagtcccgtctccagggtctcggtttccctggctgtgggataggtggattctccagccctgggaggtgcctgggaagagctaaggctgtggggaggaggcgggggcagcacggaggggcggagatgggggcggggccagagccgtgggagggggaggggccagaactgggcggggggaagggcggaactaagagggggccagccctgaggggcggagccagcgtgttggaggggtggggttctgaagcttgggcggggcgagagctgagagaagggcggggctaaggctgggggccgctgacagcagggcagcgggagacagaggagccagtgctgttgagggggcggggctctggggagtgggaggggccaaagctgcagcggaggaagggcggggctaaggctggggagcaaagcagcgggagggggcgggggcatggctgggggcggagccagagccgtggggaataggggcggagcctaggcgcgggttccccaccagaaaatggggctctggcctggctcgcggaccacgtagtagtctttgtcaagcggcagcagcttagctaggccgaagtcagcgatcttgacgtgtgcctcgctctccacgaggatgtttcgggcggccaggtcgcggtgcacgcagcggcgggagcccaggtactccatgccctgcgggcgggcggtgtgagcgtgcagagaggatcccaggataatccggcaggtaccccaagcgtgacctggcaccccaacccagaccccaactataaccctacccccgagccatcctccactgaagttctgatcctgagccctaagccaaccccaccactcccgagacctggaccccaaaccactcctcagccttcaccgcgacctccaagcagacccctgcccaggccgtgccagctgaatccccacaagtcccggggcgccccctcgcaccttgcagatctgcgaggaatagagaaggaggcggctggcatcgaggcgcgcgcggtgccgctgcaggaagtcgcgcaagcagccgctgggcaggtactccatgaccagccgcaggctctggcggcctggagaaggcaggatctgtcacagcagggcccagccctgctcgtccccccattcttcccccctttcacagtgggaccttgtgtccctctcgacctcagttttgctgactgtaatatgggaaccgcaacaatgacacattgctaatatctcttgagtactttctacaacatacattgatgtgtttatatatcacggccaggtgcagtggctcacgcctgtaatcccagcactttggaagcctcacttgaggtcaggagttcaagaccagcctggccaacatggtgaaaacccatctccactaaaaacacaaaaattagccgggtgtggtggcacgctcctgtaatcccagctactctggaggctgaggcaggagaatcacttgaacttggaaggcagaggttgcagtgagccgagattgagccactgcctccagcctgggtgacagagcgagactctgtctcaaaaaaacaaacaaacaacaacaacaacaaagtaaatatcacaatggcccatttttcagctggagaaactgaggctcagaaaagttaaggtttcacaactggtaaggggtagagtcaggattcaaacctgtaacccatgtgaatctggatcaataatcacgttcccagcctacctaaagtggcctggcaggagggtaagaatgtgcactttgaaaagcacccatacgtcttggttcactcatccgggagctggctcacccgggccatagctgacaccacgatacttgacaatgaaatcactgtgcagtgctttgaggatctgaatctcccgctgaaagtccctctgctggtctggcccgctgtgctgcagctgtttcacggccaccagggcacctgtattgtcgcctagcgggtcatagcggcacagctccacgctgccaaagttgccctgggggatagcgggactgatgtccaggcacctggatgctgccctgccctctccaacccaccctggccctgcccaccttaccttgcccagctgtgagatgtacttgaggtgtctctcctcgaagatcgtggggtcttggcaggcatagagctgggcaccattccacagcccatcacgaggtgccagggcaccaggtgtggggtctgagaggagctcatagtctggggtgggggcatgggcagtggtaagcagcgcctctcatcctgggccccactcctgagttgacttgctgtgcaacctccatctgcatattgaccctctctgtgcattatggcagggccattgcaagccaaagggtaccttgtggagactggaaaaaggtgtctcccactctgtcccaggcaaaggaagcctcctcgtgcagtgcacaccctgtgcaactccacatggctacaaagatggaggacataatgagaactcatttccccagttccactgctatgaaatgtggccacatgactgagctcaggctgatggacaagatatgctgggtgcccctccagtcctgacccatggaaacctaatacggggccctccacactctctcttttatctgcagaggatccaacggggacccaacgcctgaggtgagtgcagccactaagtgagaggttcctgtgggcctggacaccctcattgaatgaagactaaatatcacactgggcatggttgtgtgtgcctgtaatcccagctatttgggagactaaggcaggaggattgcttgagccagtaattcaagaccagcctggggaacatagcaaaaccccatcacagaaaaaaaaaaaaaaaaaaaaaaaatccagcctggtgtggtggctcatgcctgtaatcccagcactgggtggctgaggtggacggatctctttgagaccaggagttcaagactagcccggccaacatggcaaaaccctgtctttactaaaaaatacaaaaatttagccgtgtttggtggcacgcccttgtaatcctagctacttgggagtctgaggcgggagaattgcttgaaccagggaggcagaggttgcagtgagccaggatcacgccactgcactccagcctaggtgacagagggagatagtgtctcaaaaatataaaataaaataaaataaaaatgcatacaggcatgcatcaccatgcctggctaattttctgtttgtttgtttgtagagatggagttttgccatgttgcccaggctggtcttgaactcctgggctcaagcgatccacctacctatagctggaactataggcatgagccactgcgcccagccaaacatttttttaaaagaatgaaatagaccagacatggtggctcacacctgaaatcccagcactttaggaggtagaggtgggcggatcacctgaggtcaagagttcgagaccagcctagccaatatggtgaaaccccatatctgccaaaaatacaaaaattagctgggcgtggtggcacacactgtaatcccagctactcaggaggctgaggcaggagaatcgcttgaactagaggttcaaggaggtagaggttgcagtgagccgaaattgtgccactgcactccagcctaggcaacagagcaagactctgtctcaaaaataaataaataaataaaatatcatcatgttgaaccttgaactgaggggactgttcgttacagtagctgttgaagctcacactgactgtcacagtcaccaacccctccaacctcaccagacacacagggcgtggcctgctgcaaaccacgctccttccactgggcccaatatgacatcacagccctccccacccaacccgtcccagcgggcacctgaagagatgaggctattgaggtcacgaatgacggctcggaaggagggcctctggaccggctcataggccatgcactgttgaatcagcagggccagctctgtccacttgggggccggcagctgctgccggtcctcataaaattggagtttctgagggtgagaggagcagtcggtaatccccaacccaatagacccaccccaatctccccagactggatgtcagtctgcccttctgtcaaagtgggggttcggagaccgatgccgggtgaggggctctgaccttagcaggatccagggcactgatgggcatggtgacgccactaaacacttcccagaccgtggcgccgaagccccacttgtcagcttccaagctaagtgtctgcgcctcccggagacactcgggggccacccaggggatcctgtcggtgagcactgagggaatgaaagtgggatcagggatccacttccttgccctgctcagcccctccctcctccacctccaggaacttactctccaggcttaacacagcggggctgaccccagggtcactcagcttgatgaagggcgggctcccatcagccccctcccgagccaggagcaccttccgggcagagacattgccatggggcaggcctttgtcctcctaagggggccagacacaggaaaatgcccgggagggtttgatgaatgaagagtctgtttggcaaactcctatacatccttcaaaacccacttggtactgctcagacatgctccagcatcgtccctgactcctgacatcctgtcttgcccctctagttcaccccctacactgacctggctatgtccctccccttctcaaacaccaccccatcctgtgactccccagtgcctttgacacaaagtgaaagctcctcagcctggcattcaaggcccttgctcaagcttccaatgaacttcccttccacacttgcaccctggtctcctgccaacagaactgcctgataggccccaggggatgcaacacactatctagcctgcaggcctttgcctaggctgttccctcagcctgacattccttccttcctttcttctcttgatgaacttctactcaacttttaaggccctatctccaatgttccttcttctaggaagcctttcttcctgcccagcctcgtcattcaccacacgccctgacatccaagaatgacttgttctcttctagtgttctcacaacctgaacctaaaatgccctcccctcgaacccttaccaaactcctatgcatactacagagcccactcccaattcctcttccacccagagaaagccttccctgggaatggagggtggagcaggcagaggagcactcaccagatagttgagggcgtaggccagctgtttgaccacctgcagcttccagctggctggcaccaggtggccacgttttcgcagatacatgtctatggcccccaggtgtacaaattcctgcaccatggtgcctggttggcagcagggagaggcggggttgggagactgaactgcacttgtgttgaggaggttctgccaacaccctggctctcagggtctctcaaactctcatctctgtctgttccctcccctgctgcctctgttcatacagtactcacctctcctcccacctccatctctgaatgatttgcctggaatgcctggaaggtgttgagccctgtctgtatctgtatctcacttttttttttctcttttcttttgagacagagtcttactctgttgcccaggctggagtgcagtggtgcgatctcggcttactgcaacctctgcctcccgggttcaagtgattctcctgtctcagcctcctaagtagctggaactacaggcgcatgccaccacacccggctgattttgtatttttagtagagacggggtcttgccatgttggccagactggtcttgaactcctgatctcaggtgatccactcgcctcggcttttcaattacaggcatgagccaccacgcccagcctctgtatctcacttctaaccctttgcatattctgtgtcctctgcctagaacacccctcttcctttcctaatccacacttgtccttatctttccaggttagaatgcatctctgtcttcccacaagcattgcccaacccccaggctggcccagcagcctctctgaccatccacagtgctccgtgctgccctcctcacacctcatcacaccctgcctgtcacattctaggctctgtcccagctcctggcccatcctagactcccaaccaatgaaaccaaggctcagaaaggttacgtgacctgtacaaagctgcagagattagaaagccaggtttgtctgacttcaggtcattctggggctggatatgggtgagaacctggagccgctttccaaggagtgatgatggagagacataaataaagggtaatgaacacggctcccatccagggtggcccagtgtgttgctggggctgtcatatagcggctcagaacagaggtgggaagaacagcctagacttgggtgaggcaggggtggggtgggtgggtggggggctctcactgtctccagccatgcacacgccgtggagcagcacgagatgccggtacgacacttggctcatcaagctcgctgcttccaggaatgactggggaaggtgggaagggagagaagatgcgtgggtttcttccactccaataatcccaaattttgtgctcacagacctgccttaggggaacacctggccacaggtcacctttggccctggagtctgccattagtgcacacagcactaccatgattttctgatacgggacagaagttcccactatcatctatggttttttgttttgttttgttttgtttttgagacagagtctccctctgtcacccaggctggagtgcagtggcgcgatcttgactcactgcaacctccgcttcccagattcaagcaattctcctgcctcagcctcccgagtagctgggattacaggcatgcaccaccacgcccggctaattttgtatttttagtagagacggggtttctccatgttggtcaggctggtctcgaactcccgacctcagatgatctgcccgcctcagcctcccaaagtgctgggattacaggcgtgagccaccgcgcccggcctaaaatttttttgtcaagacgaggtctcgctatgttgcctaggctgttcttgaactcctggcttcaaaccatcctcctgcctcagcctcccaaagtgctgggatgacaggcatgagccaccacgcccaggtccctgtgtgtttttaaatttctctgcatccacgaccccctctccagccagccccgactccaaaagtctggtccacattgctctcacctccatgcagttcttgtgcttggcatccatgaccttcagcagcacctctgtctttcgggcctccccatccaccacctcatggcgacagccccggtaaatcttggtgaaggacccatggcccaggttctcatgctgaatggtgaggggacagcagaagaggccagtgagggggttcctgcaggatcccagcccaagcgagacatagctgctggccccattttacagatgggaaaaccgaggcaaggtaaaattatagcatatgcctgaggccacgcatctgagtctctggaccccagactgaggtatcgcctcatttcccagggcctcttacccactccaggctgtcagcagggatcttgtgaaatgtcatctgactcagctggtattgggattggggctgaaccaaggatgatgtgggtgggctgtgacctctctggaccacgatcaggttggacttttctatggggagaggatgagggagaaaaaccagaaatcagaggtgaaaagtccccaagggttagctaactcatgccttagtttgaggtaccctctagaagccgaccctgagatgaagacttcagggcacatggctttttgttgttgtttttgttttgttgttgctgctgctgttgagacggagtctcactctgtcatccaggctgggtgggcagtggtgcgatctcagctcactgcaacctccacctcccaggttcaagcgattttcctgcctcggcctcccgaatagctgggactacaggtgtgtgccaccgtgcccggctaatttttttttttttttttttttgagacagagtctcgctctgtcacccaggctggagtgcagtggtgtgatctcggctcactgcaacctctgcctcctgggttcaagtaattctcctgcctcagcctcccaagtagctgggactacaggagtgtgccagcacacccagctaatttttgtatttttagtagagatggagtttcaccatgttggccacgctggtctcaaactcctgacctcaggtgatccatctgcctcagcctcccgaagtgctggtattacagacgtgagccactgtgcctggctggcacatggtttatttgaaaggagatccagaaagcccccatagggatttgggatgagcgacaaggaaggaaggagccctgcagggggctttaatgagcaagtggcactgtggacaaccagggatcggttctaccagggattctgggagactcagaagaactcacatctcagaattgtcccatcagaggggtttgtccaggagtgaaattcacccagaggaagagctgagagctggagagagactaggtgcagatgacatggctcacatctagctgtgcctagatcaagccagacctaaaggttatatatctctaacttcctgagccaacaaatcaccttttcttccctaacccaccttgacctgcagtttctgccacttgccacccacacaggagctgtcacagacatagaaagccagggtcccagatcagccactcattccaggggaggaaggggctcacctttgggtctggggatacagcaggaagtgagggtcactgccaccccatctacgtgcagccccccatcccagcaggttgccaggagctctcgaagactgctgtggggtcggctgaggccaaccagaaggaaggttcctgtggggctgcgccggatgaggcagcccttataatcaggaccaagggggttctgcaaagaagagtggcccctgagtgggactgagcgacagacactctccttctcagtccttcttccttttttttctttttttttttttttttttggagacggagtctggctctgtcacccaggctggagtgcaatggcgtgaccttggctcactgcaacctccgcctcccaggttcaagcgattctcctgcctcagcctcccgagtagctgggactacagatgcccactaccacgcccagctaagttttatatttttagtagagacagggtttcaccattttggccaggatggtttcgatctcttgatctcttgatctgcctacctcagcctcccaaagtgctgggattacaggcgtaagccactgtgcccagcctcagtcctttctcctaaagcaccatgaactcattccagtctttagacctttgaatatgctgttctgttcaccgggggtgtcttttccctcctattcttcaggaaccaaatgctgactgatcttttaaatctcaattcaaacgtcacctcctccaggcagccctccactacccaccctagcagtagaccgacctggacacagacagtgaggaggaagctgtcaaagtcctgggggctgcggcggagaacataggagccaggacgtgagcccccagtcttgagcttgttgatggcaaagtccagactgtgggggaaggtgagagggaatggggaggagtcagagatagaagaagacagagagacctgggctcaaattcaggtacctctgtagccctgggatccttgccaggtgacaccctccccccatttataaaatcagccatgggccaggcgccgtggctcacgcctgtaatcccagcattttgggaggccgaggcaggtggatcacgaggtcaggagatcaacaccatcctggctaacaccgtgaaaccccgtcgctactgaaaatacaaaaaaatagccgggcgtggtggcgagcacctgtagtcccagctactcgggaggctgaggcaggagaatggcgtgaccctgggaagcagaggttgcattgagccgagatcgtgccactgcactccagcctgggcgacagagccagactccgtctcaaaaaaaaaaagaaaaaagaaaatcagccgtaagtcttggcctcttctgggagattgtttgtttgtttgtttgttttaatagagacagggtcttgcttggttgcccaggctggagtgcaatctcagctcactgcagcctccaactcctgggctcaagtgatcctcctgcctcagcctccggagtcgctgggactacaggtcaaccaccacacccagctatttttttttctttttttgtagagatggggtctctcctgttgcctagacttgtctccaactcctgagttcaaacaatcctcctgccttggcccctcaaagcgctgcgattgcaggtgtgccccactatgcctggcccttcctgggagattaaacaagaggctgtaggtgaaggtgggcgacttgtccatctccaggaaatggccctggggtcagagagagagagagtagtggtcgccctgtgaagcagaaggaatacttcagcttcactgagcgctgactgtgcggcaggtgtggtttgaaaacttgacccctgtccagggctcctggaaggtgaggacactgaggcatagagaaggggaggggccctgagtggccacagaggccgggaatgggggacaggtccttacgtgatggggccgtggcactgctcggccacttcctccagcagcctcggcggtgccacctccttgcagaagaagtgctgggagtccgtggtcagccggaagtagccgtccacgagcgccacgaacgacagagcctcgggcagccctgggaactcggcctcctgcgagggacaagcgtcagagcccagtgaaacccgagggtgccggtcccgccctcggggtaaggctgaaggggaggggaatcctgcacccactaaaatctggttgtctgtcctggtaacagtgaccaggcggtgctctccggccgggccaacgcgcggggcctgcttgatgctaatgtctacgatttctggaaagtcgcagaagggctggaggacctgggaaggagggggagtaccgaagtgggggcccagctggaccccgccaaaccacgcccatgaacccacccccaagccacaccatccactccctatccctttgccattcaacccttccaagccgcgccccctcctatcaactccaacctctcaacacctcccctacccatccccaaacatctcccacccgctctgccaatccccgcctccttctctctgccggaccccgccccttgatccctgccccgcttcgcagcctcccagctctcggagcctcactctgcctcttagtcttgcctcgttccagcgcccacccacccactcctcaacccctcccattttcattcccgggtcgctcagcccaacccttcactcagtttgcccctcccattcccgcagtctcctccctcactaagccccgcccctcattaagcctcgcccacttccccaagtctttcgttttggctccgccccacatcccctaccactctccggcccctccccgagccccgcccccacgttggccccgcccagcgggggagtccgccctcacctcctgttctccctgggtccaggcgatgccgccgtcaccagccacgcggagcagccccagcccgtcgtggccaccaagggccccagggaggcccacgtggaaggtctcggcggccccggctggatccagccgctccaggtccatgatgtacttggccatgagcgagtgccggtctgcctggcaggcggccacgcggcgcagggctctgcgcaccgtcctccgaatacgcctccgcgtcacgaagctcaggccctggatcaggtcgcgcaggcttgggggtaggcaggccttgtagctgcaggggttggaggggagggagccggccctcagcgtcgggaggggtccccgcggggacacacacaaacccaggctttagcccaggggctggggtgcggccctagttggggcaccaggcacacacagactctcattcagggtcaggtatgaggaccggacctcagagtaggggagggccattggcgcccacaggtcggacagggaccccacaggccttttagctgggggaggtcaggtgtctgtccagctggagcctgggggtggagagggctgggttcgtgggaggccctgggtcataggaacaccctgaaagcttgcaggagaactccatggtgggagcccggcaaagccccgatggagcccacgttgctcactcccaagcagaggccgtccccacagcctggtggctctcacctgacagtcttcagcagctctcccggccgctgggcctgctctcgcgccatccgggccaggtccaacacggccaggctgagacactcaccctgctccttgagactgaggcccacggggaggcgcccactcaccaggtcactgcggtgctggggggccgccacagggagcatcagctgaggccacccaacttcaagccctgttgttaacctgcagacccccccaatcctgggctgacccccacccctggactgccacagggagggtcagacgaggccccacctgattgcatgccagtcctcatgttgccccttggacccccaaccccctgggtcaaaccccaggcagaaccccacctgggcaaagaggtgctccaggactggcaggtcaaggatagcactggccaaatccttgcgtagcccgaagcggtggcacttctccagcccaaaccaattggggaagtaaaagctgtgaggagaggagagaaccctgggatgaaagtgcaacccagcctcagtaggagtgacattatggtgggggcgagggacagattctgcggaggcctcacagagcccagcttgtacctttaacttgctgtgtgaccttgggcaagtgacccaccctctctggtctgtttcctcatctgagaaatgggtagtgaccatacctccctggggcaggggtgtgggcacctcgaaatgcaaggagatgataaaattgtacaatccctgggggctggggggcacttcctaccgaatcctgtacagcaggacttgggtgctggcatcctccacggagaagatgtggctcggggggaaccagcaggacaggtcctccgtggccagagcaaagagggagtggtacacaggcaggatgcctacaggggatggtcccatcagctccctcctgagtcaccccatctgtgcccttcaggagtgccagcatcatacccaaccgtccagatccttccatacctcaaggtatgaccagctgttcccttcatgtgccgtcacacctctccgtctgcacaggccattccctctgcctcagaagccaaccctgcacacccttctccattacaaaactcctactcatcccccaaagccccagctccgatgctgacttctgcaggcaactattccagcttccaatcttggccccacacagccccatccttccctctggcccgatccactagggatgcactcaccgctggccttggcagcctgcacgcacaggtcctcagccaagtggtccccaaaggagaaagataggcgctgggggggcccggggccccgagcgggcagcagcacatgcagggcaccagcctccgtggacaagaggctgcatgaacgctgagggatcaggggcgtctcttcacttggaggtgccatgagtgcaacttgcctggggcacagagagaaaaagcccctcagtcctggtcagaggggattggacttctgagcagggagggcatggaaaggagtgctggaggccgggtgcggtggcttatgcctgtaatcacagcattttgggaggccgaggcgggaggatcacttgaggtcaggagtttgagacctgcctggccaacatggcgaaaccctgcctctaaaaagtgcaaaacttagccgggtgtggtggtgcgttcctgtaatcccagcaactcgggaggctgaggcaggacaatcacttgaacctgggaggcagaggttgcagtgagccaagattgtaccactgcactccagcctggacaacagagtcagactctgtctcaaaaaaaaaaaaaaaaagaaagaaagaaagaaagaaagaaggaaagcctccctgggatgggcccaggaggaaactggccccctgcttccagcccccaacacctcccacccgctcgctcacttgccctgagaaacctcagcactcagggccctcagctgggtggggccaggggtggggcttcgagtcccctgagaaaaattggggagaaaaaggaggtcactcaaattgacctgaatgaagaagatctgaagaaagtgttgggaaaaacaaacaaaaacctaagttccagcagggcgcagtggctcatgtctgtaatcccatcatttccggaggccaagaaggaaggatagcttgagaccaggagtttgttttatgttttttgcttttttgagacagagtctcgcgctgtcacccaggctggagtgcagtggcgcaatctcagctcactgcaacctccgcctcccaagttcaagagattctcgtgcctcagccaccccagtagctgggattacaggtgggcaccaccacgcccagctaattttcttgtatttttagtagagatggggtttcactgatctcaaactcctggcctcaagtgatcagcctgcctcagcctcccaaaatgctggattacatgtgtgagccaccgcgcctggccgagaccaggagtttgaaaccagactgggcaatatagtgagacctcctctcaaaaagaaaaaaaagccttgtaatcccagcactttgacaggccgaggcaggtggatcacttgaggctaggattttgagacctcatctctaaaaaattagcagggcatggtggcacacccccatagtcctagctacttgggaggctgagacaggaggatgccttcagctctgcaagttgaggctgcattgagctatgatcacaccactgcactccagcctgggcgacagagcaagaccttatctctagaaaaaaaacacaatacaaaaactatgatccaaaataatgccctgtggctggggtggggcggcattaatgagggtttttttgtttttgttttgagacagagtctagctctgtcatccaggctggagtgcagtggcacaatctcggcttactctgcatcctgggttcaagtgattctcctgcctcagcctcccaagtagctgggattacaggggcacgccaccatgcccggctaatttttgtatttttggtagagacggggtttcaccatgttggcgaggctggtctggaactcctgacctcgagtgatcctcctgcctcggactcccaaagtgctgggattaccggcgtgagaaactgcgcctggcctaatgaggtttaagacaatcagaggactaggacccctaggactcagctttcgcagctgtgaaatgggctgactccccagcatcctcattgaggtggtctgctgagcgcaatccaggcctaaagtgtcaactcaattaatgtgcattaatttgtatatttcttgatgatgtgccggtaagcgatcaacaaacgcctgttaaaccaaacaggaagggcaattggcacagcggtgtggtggttactgtgggaagggaagtcttgtgggggaaagaaccttaccaaagggacactttgatgtcaccgatgcccagaccaagaatgagcacattcctagtcccgggaaccttggaggagccccatctctcccacagagagattgatgtctagttttgccctttatagaaataaaatcacacaccatagcctctctatcgtcccctcaacatcagccaatcaagttttttggtttgtttgtttgtttttttgagacggagtctcgcactgtcacccaggctggagtgcagtcgcacgatcttggctcactgtagcctctgcctcctgggttcaagcgattctcatgcctcagcttcccaagtggctgggattacaggcgcgcaccacagcgcccagctaatttttgtatttttagtagagacggagtttcaccatgttggccaggctggtctcaaactcctggcctcaggtgattcgcctgccttggcctcccaaagtgctgtgattacacacgtgagccacattgcccagcctttttatttatttatttattttgtaggggggaggacggattcttgttctgtctcccaggctggagtgcagtggcatgatctcggctcactgcaaactccacctcccaggttcaagcgattctcctgcctcagcctcctgagtagctggaattacaggcacccgccaccaaacctggctaatttttgtgtttttagtagagatagggtttcaccatgttgaccaggctgatctcgaactcctgacctccagtgatccgctggcctcagcctcccaaagtgttgggattaaaggcatgagccactgtgcccagccccagtcgagtttaaaataaggcttcagtggcagtggcgccccactgcaatcccagctactcagggggctgaggcagcaggatagcttgaggccaggggttagagacctgcctgaacaacatagcaagactcccatctccaaaacaacaaaaaaatcttaacagaatattattattctgtaatactgtaacaaaaaaaaatgaaaagtcagaggtgatgtttggtcccagaaaacgccatagtttttttggttttttaaaaatgtttgtagaaatggaggtctggctatgttgcccaggctggccttgaactcctggcctcaagctatcctcccgcctcggcatcccctgtttataatcctcaacgttctgcatcctggtatggtcgggtaccctgtgtctggaccgggaaggcctggagggtaggggctgggaactccgccccccaatccctccttcccaatccctcctccccacccccaaccccgcagcccccgtcgcgcatgcgcaatgactcctccaggtccgcaaggcaggcatctcccggccttagtcaaagccgaagcccagagaagcgagcgatcggaggatgcgagtctcggctcacgtctgcctcgcagctttcctccgaggcctggaaggcgagctagcctttgccctggcagcaccctgccccagcccagccatcccccgccaccaccatcctcccccagtgtctgggccgagccctgcggcatcgccagctcttacctagcgggcagggaccctggactttcgaagggcgggcagagccgggaggcagcgagaggaaagtcccactcggctccttcctgtgtgggccccttggtttcctgagccactgtcatttaccgaaagtcagggccctgcgggagctgggggcggggaggcgggcaaggaggggcagaaagttccggaagcctctgcatcagccgccccgttcagacaggctgctggagacccctaagccaaaggaactgatgatagcacagagaagggtctgggtcacaccaggggctcagccgactctagacccacttgttaagtggggctctggcccggcccttattgcctcagtttacccatctgtagcatgtgtgagttgggcacccagtggaactaattttgcacccagggaaggaaacctggctggatttgcccaggagggaagcagggaagttgccccagaggaaggtcaagttcttctttgaggtatttctcccttaagactcagggagacgctgggcgcagtggctcacgcctgtcatcccagcactttgggagactgaggcgggcgattacttgaggtcaggagtttgagaccagcctagccaacatggcgaaactccgtctctactaaaaatacaaaaattagccaggcgtggtggcctgtaatcgcagcactttgggaggctgaggcgggcggatcacttgaagtcaggagtttgagaccagcctggccaacatgatgaaaccctgtctctactaaaaacaggaaaattagccaggcctggtgatgcctgtaatcctagctactcaggaggctgaggtgggaggattgcttgaatctaggaggcggatgttacagtgagacgagatggcgccactgcactccagcctggcaacagagcgggacttcgtttaaaaaaaaaagaaaagactcagggagagataatgacccatttctgcctgtggtgccctgggcccagccctaaaaaaccaggtggatccggcctggcctcttggaacttgtgatctggcgctgagacaatgagcaaatgaaggagccaaatcatcgcagacaacaaagaaagccagggtgtcaggacaggcacagactggaacttggacccgaggcaggacagggagctggccagggaaagggtgctccaggaggagggcacaggatgggcaaagaccttgagagggcagtgatcttagcagcttgaagagcagtcaggaggccaggggcaggggtgagatgagggggaaggggactgcagggcggtcaacaggggcaagatcgtggggggacagggggatcagggtctttgggagaagggtgggttttgcctggagcataatctggagccacaggagagttggaagtaggagctgttataaatagaagaggcagaaggcccgggcagcatccaaatgcagagacttgggccagtgttcttaggataataggatcagagccccggaagtagagcttcaggaatagactgacgaagtggtgaccgggtacagtggctcacatctgtaattccagcactttggaaggcccaggtgggaagattgcttgagcctaggagttcgagaccagcctggccaacatggtgaaaccccatctctactaaaaatataaaaattagctgggcgtggtggcatgtgcctgtaatcccagctacttgggaggctgaggcaggagaatcactggaacccaggaggcaggcggaggttgtagtgagctgagattgtgccaccgcactccagcctgggcgacggagcaatactctgtctcaaaaaaaaaaaaaggaatagatttaagaagttgtggccaagaacagtggctcacacctgtaatctcagcactttgggaggctcaggcaggaggatggcttgagcccaggtgttcgagaccagcctgggcaacatggtgaaaccctgtctctacaaaaaatacaacaacaacaaaataataagctggatgtggtggcatgtgcctgtagtcccagctactaggggaggctgaggtgggaggatcacctgagcccaggaagttgaggctgcagttagctgtggtcatgccactgcactccagcctgggcaatgggagtgagatcccgtctcaaaaaaaaaaaaaaaaagacttttcatctctgtatcaccatcacaagtcttaacacaaaatggtttggtaagtattttgttgatcttaactgttcaatcagccagaggcttattggacacagcctgtgtgcagggaatcggggacaatgcagacccaatccctgtccaggggagctgacagtccagcaggggagatggcaataaacaagctattgcccaataattatatcagttgcccctgggaccggtctgctaagagagatgactggatctgggagggcttcctggaggaggtggctttgattctgaaatccaacaacaagtgggactagccagagagtgacctgagaatgtgggagtgtgggcagttctggcaggcagaacagcccaggcaaaggcctggaggcttcacgaattcacagtgttcctgagaagagcaggatgtcagggacacggggggctgagactcatttgatggcgtgggtagggccgcgtgggtcaagggaaagagatatagattatgtcctcagcttagtggagcttagtggagccacagctgacctgcggcaggaagtgccaagcagaagcttagttgtagtgttttctttcacttcctgggtggcttcagcagacgggaatgcaaccttatgttctcatccttggcctgaggctgaagcctctgctttccggaagtacagtgagtttctgggtctctgctacctccagtgtgatggtttctgcaatattttgagaataagtaagaggagattggggtgaggaccaaagtggtaccttcagccccagagaagggcatgtgaaggctctaaaaggaagttctggccgggcgcggtggctcacgcctataatcccagcactttgggaggccgaggcgggcggatcgcctgaggttaggagttcgagaccggccttgccaacctggtgaaaccccatctctactaaaaatacaaaacgcagctgggtgtggtggcgggcgcctgcagtcccagctactcaggaggctgaggcaagagaatcacttgaacctgggaggcggaggttgcagtgagccgagatcgcacaactgcactccagcctgggcgacacagcaagactccgtatcaaaaaataaataaataaataaataattttttttaaaaaaaggaagttctggggacagaacccagaacttgcccgagaaaaatggggcacgtcagtgatgcaaacacccagatttttctgctgacaagaagtccataaatacaatcaaagaataaaatacaatcaaagtgtaactggaaacaaaattgaactcatggataaaatatcctcgttatataagtaacatctagaaagcagtaagaaaatgccaaccagttaggtggatatgaatccagaagtcagagaaaatggaggacaaatagctcttaaacccagaaaaatttcctcagcttcacttgccaaatgaaaattaagagtacagtgaggcagggccaggcacggtggctcatgcctgtaatctgagcactttgggaagtcaacatgggaggatcatttgagctcaggagttggagattagcctgggcaacatggtgagatccgtctctacaaaacatacaaaaattagccaggcatggtggtgtgcacctgtagtctcagctacttggaagactgaagtgggaggatggcttgagtccaggaggcagaggttgcagggagccaagatagtgccactgtactccagcctgggcgacagagcgagactacatctcaaaaacaaaaacaaaaatggtaaaagactgaataacttcctcctgagattggaaacaagacaaggatgtccattttcaccacctctattcaacattgttctggtgatgttagccactgtaataagaaaagaaaaagcaggctgaggcaggagaatggtgtgaaccagggaggcggagcttgcagtgagccaagatcgggccactgcactccagcctgggtgacagagtgagactccgtctaaaaaaaaaaaaaaagaaagaaagaaaagaaaagctgggcatggtggctcacgcctgtaatcccagcactttgggaggctgaggtgggagaatcacaaggtcaggagttcaagaccagcctgatcaacatggtgaaaccccatctctactaaaaatacaaaaattagccaggcatggtaaaaatacaaaaattagccgtgcgtggtgatgcgcgcctgtaatcccagctactcaggaggctgaggcaggagaatcgcttgaacccgggaggtgaaggttgcagtgagccaagatcgcgccactgcactccagcctaggtgacagagggagactctgtctcaaaaaaaaaaaaaaaattaaaaattggcagggtgtgatagctcacacctgttgtcccagctatttgggaggctgaggattgcttgagtcagggaggacaaggctgcagtaagccatcatcacaccattacactccagtctgggcaacagagcgagatcctgtcttaaaacaaaaaaatatatgagaaaaataaacaagtcaggtgtggctgggcatggtgatacatgcttgtagcctcagctactggagaagctgaaatgggagcccaagaatttaaaggcaacatagcaagattctgtaacaagcaaaacagaataaaataagtaataaaaaaaaggtaaataaaactgttgctatttgctgatgatatgattgtttatgtcaaaaacccaagggaatctataagacaactactgaaattaatacataaattcagcaagttaccaggtttaaaaagtccgttgaattcaatacaaaagtcaattgaatttttatacaccagcagcaaacaattggaacataaaaaaattttgaaaaatttcctttgcagcagcactgaaaaagataaaatactgtgatggtctgagagtttgcgtctccccaaaattaatacattgaaatcctaacctcgaaggcggtggtattcagaatcggaaccttttaagaggtgattagatcatgagggttgagctctcatgaatgggattaatgcccttataaaagaggcccctaggctgggcatggtagctcacgcctgtaatcccagcaccctgggagaattgcaggctggtctctgacaaacaacttgtgtttgagaccagcctgggcaatgtggcgaaacaccacctctaccaaaaaaaacacaaaaattagctgggcatggtggtgcacacctgtagtcccaggtcaggagtttgaggccagcctgatcaacgtggagaaaccccatctccactgacaaaacaaaattagctggatgtggtggtgcatgcctgtaattccagctacttgggaggctgaggtgggagaatcgcttgaacccaggaggtggaggctgcggtaagccgagatcacaccattgcactccagcctaggcaacaagagcaaaactctgtctcaaaaaaaaaaaaaaaaaaaaaaaaggccgggtgcagtggctcatgcctgtaatcttagcacttcgggaggccaaggtgggtggatcacctcaggtcaggagttcaagaccagcctggccaacatggtaaaaccccgtctctgctaaaaatacaaaaattagctgggtgtggtggcgcacgcctgtaatctcagctactctggaggctgaggaaggagaatcgcttgaactcgggaggtggaggttgcagtgagctgagatcgcgccactgcattgcactcaaggttgcgtgacaggaaagaggctacatctcaaaaaaaaaaaaaaaaaaaaaagaaggccagggacctggagtccggagtgcatacaagtgggtggctttgcagtgttttgaggaccaacggtcagaaaccaagatttgggtgtcttgggcccagccttgggaaggcactggtgccagtaactgagatgagggaaagagtgggaaggatgaggcacatcagcattgtgaacgctccgtgatccaagctgtggcttggcccaggatcctggatgaacaaactggtgccttcaaagtccctgggaaaaagacaggggggacaggggtgcccttggacagccctgctaaccaggaactcctcgcctgggccccactggatggtgataacagagacacagagtagcccaggaccagcctgctcaggtcagattcctgcatggcccgaggtgggggcagaggaatcctgccaggccaggtgtgtcactaggaagccggggccacggcatcactcaggcaccgacaacatgtaaaagaaagaaaaataataaagcttttttttttcttttaaattaagacagtttcactctgttgcccaggctggagtgcagcggcatgatcttggttcactgcaacctctgcctctagggttcaagtgattctcgtgcctcagcctcccgagtagctgggattacaggtgtgtgtcactgcacccagctaatttttgtatttttggtagagacggggtttcaccatgttggccaggctggtctcgactcctgacctcaagtgacctgcccgcttcagcctcccaaagtgctggggttacagatatgagccactgtgcccaaccaaaaagaaaaataataaagctctgggccgggcgcggtggctcacgcctgtaatcccagcattttgggaggctgaggtgggtggattatctgaggtcaggagttcaagaccagcctgtccaacatggtgaaaccccgtctctactaaaattacaaaaattagccgggcgtggaggcagatgcctgtaatcccagctactcaggaggctgaggcaggagaggatggcttgaacccaggaggcagaggctgcagtgagctgagattgtgccactgcattccagccttggcaatggagtgagactccgtctcaaaaaaaaaaaaaaaaaggaaacaagaaaccctgtctctacaaaaattagccaggcatgatgatgggtgcctgtaatcccagctactctggagggtgaggcaggagaatcgcttgaacctgggaggcagaggctacggtgagatgagatcacgccattgcattccagcctggggaacagagtgagactccatctcaaaaaaaaaaagaaactaaagaaaaataataaagctttgaaacaaacagcacatcacgacccgtgcccttccccaccctggcatgcccctccctccactccaacccaggccttgaaggcagaagcacgaggccccaaggccagggctgggtctcagggatctccctctcgtcttcttcctcctcccctgtcctccctaaattccttttcctgccccgttcctgctgtcccaggatccaatttgtgctccaggctgcgctctgccctttccagcatctctttccacctgcttgtagccgctcagcactttggggaaactgaggccagagcggtgagttccagcacagagggaagggcagggcctcaaccttcccagtccaaacaatcatacgccatttaaatctcacaacaaccctaaaagctggcgactattattggcctcattttgtggaaggggaaactgaggcccagagcggcaacgcggccagcgaaccatcggtaagatttgaacctggttgtgtatcattcaacggtctagcgcttggcctcagctgggccaccgcagatgggacatggttctgctgccacctggtggacactcgcggcagcgctgttgggatagagccgcctctcacctgacgtcctgccccgaaaagcccagccagaggagggctgacctgctcccctggcctccctgccccgcatcacgcccatcagttttccgaattttcacagtctaagtgtccaccaggaagggactgggtaactaaccacctgtgctacagttgggctaaagattttagtgcaaaagttaatttgcccacctcacaagaaatactaaaaaaatgtatattttttcgagacagagtctcactctgttgcccaggctggagtacagtggcacaatctcggctcactgcaacctccgactcccaggctcaagcgattctcatgcctcagcctctcaagtagctgggactacaggcacccgccacaatacccagctaatttttgtattttttaatagaagcggggtttcaccatgttggccaggctggtctcgagctcctgacctcaggtgatccacccacctgggcctcgcaaggtgctgggattacaggcgagagccaccgtacccacccaaaataaattctttaggctgaaaacaagggaccccagacatgtattccaatccacgtgaaaatctgaagaacacatataaaggtaatgtatgtaattttaaaagattgcataaggccgggtgctttggctcacgcctgtaatcccaacacttcaggaggctgaggtgggcagatcaattgagcctaggagttcaagaccagcctgggcaacacagagagaccttgtctctacaaaaaatacaaaacttggccgggcacggtggctcacacctgtaatcccagcactttgggaggccgaggcgggtggatcacgaggtcaggagtttaaggaaaaaaatataaaacttagctgggtttcatggcatccgtcctaactactcgggaggtctgaggtgggagaatctcttgaacctgggagttcgaggctgcagtgaacagagatctcgccactgcactccagcctgggcaacagagtgagatcctgtatcaaaaaaataaggctgggcacaatggctcacgcccatgatcccagcactttgggaggccgaggcaggcagatcacgaggtcaggagattgagaccatcgtggctaacatggtgaaaccccatctctactaaaaatacaaaaaattagccgggcatggtggcgggcacctgtagtcccagctactcgagggggctgaggcaggagaatggcatgaacccgggaggcggagattgcagtgaactgagatcacgccactgcactccagcctgggtgacagagtgagactccgtctcaaaaaataataataataaataaataaaaataagatctgccagtgacagtggctcatgcctgttatcccagcatgttcggaggccatgacgggcagaccacttgaggtcaggagttcaagaccagccatagccaacatggcgaaactcttgtctctactaaaaattaaaaaaaaaattagccaggcatggtgccgcacatctgcaatttcagctacttgggaggctgaggcaggagaatcatttgaacctgggaggcagaggttgcaatgagccaagattgcaccactgccctccagcctgggtaatggagtgagaccctgtctcaaaataaataaataaaaataaaatgtagcataaatgcaaatttcttctctctttgcctcttaacatatttaaaaagcaattgtacaaaactatatattggccgggcccggtggctcatgcctgcaatcccagcactttgggaggctgaggtgggcatatcacctgaggttgggagttcgagaccagtctggccaacatggtgaaaccccctctctactaaaaatacaaaacattagccgggtgtggtggtgcacgcctgtaatctcagctactcaggaggctgaagcaggagaattgctcgaacctgggaggtggaggttgcagtgagccgagatcatgccactgcaatctagcctgggtgacagagcgagactctgtctcaaaaaaacaaaaaacaaacaaaaaaacaggctgggtgcggtggctcatgcctgtaatcccagcactttgggaggccgaggcgggtgggtcacctgaggtcaggaatctgagaccagcctggccaacccagtaaaaccctatctctactaaaaatacaaaaaattagccaggcgtggtggtgcacgcctgtagtcccagttactcgggaggctgaggcaggagaatcgcttgaacctgggaggcagaggttgcagtgagctgagatcacgctgctgcactccagcctgggcgacagagctaaactccatctcaaaacaacaacaacaacaacaacaaactatatattaattgtattgttgggtctacaatatagagaaaggtaacatatttgacattaacggcacaaaggaggtgaagggagccaagttgtactggaataagaaaatcattgggccgggcgcggtggcttacgcctgtaatcccaacactttgggaggtggaggcaggcggattacctgaggtcaggagttcgagaccagcctaaccaacatggtaaaaccctgtgtctactaaaaatacaaaaattacctgggcatcgtggcgggcgcctgtaatcccagctactctggaggctgaggcgggagaattgcttgaacccaggaggcagaggttgcagtgagccgagatagcgccactgcactctggcctggggaaaagagtaagactcagtctcaaaaaataaaagaaaaagaaaagaaaagaaaatcacacccagtagtgacttgaatccacaaaaccagattaagagaaccagaaatgcaaaataagaaaatgaaaataaaaaattgcatgcttgctgtcctttattttctttctttctttctttcttttttttctgagtcggagtctcgccctgtctcccaggctggagtgcaatggccagatctcggcttactacaacctccatctcccaggttcaagcgattcttctgccttagcctcccgagtagctgggattacaggcgcccgccaccacgcccggctaatttttgtatttttagtagagacggggtttcgccatgttggccaggctggtctcgaactcctgacctcaagtgatccacccgcctcggcctcccaaagtgctgggatgacaggcgtgagccaccgcgcctggtcttttttttttttttttttttttgagacagagtctcactctgtcgcccaggctggagtacagtggcgcaatctcgggtcactgcaacctctggctcctgggttcaaacgattctcatgcctcagcctcctgcctctttcctcttaattttacttcatagccttgtcatcagggagttgtttgcgggtgtttcttttttcatatctggtccccgtcctcatccccaggagggcttctttctgcccaagcaaactgctaagtccaagcccctcaaagtgggcggctggatcttgatccattctccggctctccgcgcgctctcccccaacccctgctccctcaggttcttatgaactggaggcagacagacagagtttgaatcccagctactacgaaacacaaatcggaccccaaattaacaaaaacagcattccagagcttattcaatattcgtgctgcaacatcgctaggagaaaaatatattatttgtattcccattttacagataccctcaggtatctggtggagacctccgtaacacacctccccggaggatgaggccccgagtgtgaagcatcgggatctcacggtaaacaccgcagccacccgaggtagcttaggttcaatgcttaggcatcctgcaggcggcgcgcgccgccgcccctagttgcagccgggactggcggagtgcctacaactcccgacgtgccgcgcgcgcagacgctccgttgcggtcgtggtggaacaggtggagcttgcctcgttgccttctgggaaacgaagtctcgctgaagagaggcggaactttgagtagcaggtggatccatagccaatgaagacgcgggtcgctttgagtgcggggcagagaagccaatggacgtgcggcattgagagggcgggtcttccggtagtgaaggcctggtgaacggctgcgcgacagaggacacttccttttgcgggtggcggcgaacgcggagagcacgccatgaaggcctcgggcacggtaaggcgggcgcggcgcggcagggggccaagggatggggcacgggccccatcaggggcctgcataagtggcgtgggccgggttggtgccgcgcgcttctgtttgggccccccttggccgcgcgccgccttctcttgttgcacccaacatggcggccatcgtgggagccgcgtggagagagcgatgcgtgacctgggccagctcagggatcgcgggggcccaaggactccgggtcttcttcccgggggaaggaataagtcgcgcagcatagaggccctagccccggcacctcgtcgagccgccaagtttctgttttcctttctgcaacgtggacgtggcggtagagcaatagtgtgttttctttctgccggaatggctgtgagaagcagatgaaaattgctaacagtgagccgaaacggggagcgtgaggcttaacgctgtggtacatactggatagaatcaaacggctctatggcgcagagataggagaacctggactcccatggagtgggtgtattatgtccagatctccagcttcggtttccttgctgtcaaaggggcgggccccattgttcccttcctgaacgtgtgccgaggccggtgggtcaggttcacagtaaaagtaggaactgcgataatttgtgactatttttcattgataactagtgaaaagctggcgagtcagtttcagaggtggtttctttgtgccatatcacagagcctggacttgaccaaagattctcacctctgcatctgtaaaccgggagtcttccctgggccaaacgtttggattgcagttgggaaaacggaggcagccgcagctcgcgtggcaacagtgcagggatcccagggctggggagagacctgaggtcttgtcctagttctgcctggaatgggctgtgagatcccatgctggtcactgggcctcagggtgaaagaagatgttggctggatgttttgaggtgcagagtggctgtttgacggcgactgcaaagcaattcaggactgcagcatgaagaaaggaggctgtgggtctaagccacagctttcctggtctgaaacccttagcccaggcaaaggagaggcaggcaactcaattaatcctccctggagacctccctctcctcagttcattttgtgtataaagttgtggtcgggagtgtgacctacagtcaccaagaatccacatggaggccctagggtggccctgcctcctgcttcccgaatctgtggtcactagatgtaggaaagggagtgaggtggatctccacagttgcctctgggtgctggccttaccctcactcctgtttcctttcagctacgagagtacaaggtagtgggtcgctgcctgcccacccccaaatgccacacgccgcccctctaccgcatgcgaatctttgcgcctaatcatgtcgtcgccaagtcccgcttctggtactttgtatctcagttaaagaagatgaagaagtcttcaggggagattgtctactgtgggcaggtatggagaggccggggctacgtggggtctggagtggatttgcgcctcttgggacatcgtgcatctcaagaattaatcagacatcgaacgggtgcggtagctcaacgcctgtaatcccatcacatcagacatcagagccccgggttgtgtttctgcctgggtcacgggactggagcagagcttatgtgccatttccctgattagaaagccagggacccagggagcgggtgggtggcatggtgggacaccttggttggtgctgtcttccctgggccctgtctgttaagtgaggagaggtgatggctatctggtcagtgggtggtagctaggttggcccagacaggttccaggagacttgagttcaggaactgcatctggggctgggttggtgtccgtggcagaagcctggacttcaggctgttgccatgggaagttcccttacctcacgctccctgaggatgcctgaaggtaggtggggctgggaaactgaggcacaagagtctggccatagagtaggcctggagcctggggtgtgctttagaggcagagggttcagtgaggatggggctagggcacatcggcttgctgctctcacatctccctgtggcctctccttggcaggtgtttgagaagtcccccctgcgggtgaagaacttcgggatctggctgcgctatgactcccggagcggcacccacaacatgtaccgggaataccgggacctgaccaccgcaggcgctgtcacccagtgctgtaagctgcctgtcccgcctccagctttttagaccctccttgactccctcacactgaggcagggcaagtgccagaggttcccagtgcaggagagtctcaggactggtggcggggcacaggaagacaaaaggatgccccaggccccagatggcgcttttctgagagccctgccaggctcggttgtaaatcacatcacatctggaaactccctttttgggtctgcaccttgtttagactgggatccacatcaccactgttttctgggacccactgagaaccgaattgaacccctgcctagtgttgggagctggcaccttttccctggctcacctgccagggtctgtgagacccccacacctccctgattgcacctaaacccaagaatcactgtttcttatagcggtggtttaaacagaggtgcaaacagcaagcggatcttgtcgcctttggggggctgtggccgtgcccctcaaagtgaatttggaggttccacaactctagtggccagtgactgcagggacccaggccttgggctatctcgcttccccaccaccaccttcccgtgagccccgagccctcaggcagttgctgtgaccaacaggatgtgtcaggtcattgggcaggcactcaggaggtttgctgaatgcccagagcccaggcaacaccgtcaccctggccccgctcctttccacagaccgagacatgggtgcccggcaccgcgcccgagcccactccattcagatcatgaaggtggaggagatcgcggccagcaagtgccgccggccggctgtcaagcagttccacgtgagtgccctgggggactcccctggagggaagtgcctgctctgacgcaggagcccagtggggggcggctacaccttggtggccccacaggatggggtgttaagaggcttccaaccccctcaacatgcctcccttcctcacaggactccaagatcaagttcccgctgccccaccgggtcctgcgccgtcagcacaagccacgcttcaccaccaagaggcccaacaccttcttctaggtgcagggccctcgtccgggtgtgccccaaataaactcaggaacgccccggtgctcgccgcatgttttctttgcacactgcagagctcaaaggggtgctatgagaggccggcccagtcagctcctggggtgcagctgagctgccatttctttgtcctgggaggggtcttcagtgcaaacaaacaaaccctcacatcctcctgtcctggagtgggccctccaggcgcccccacccctgagctccctcttgcttggtcagttctcagccctgctggcagccctgggctatgagctgcaggggtactgtctgtcctgggccctaaatctgtcccaactgccttgtgagacacaggcctcccaggctcccctgctgagtctggaccagggagaatctccctagatagtggggttggcgttcactccctggggattctcctaagtctctggttcccaaagttttcagagtagacacaagtgggcacccgaggggcgctctctgctgcttgggggctgtttccctttcactggttgggggcctcttagatgacgccctcatcttgcccaaggaggtcaaggactcaccacaggtactcatctctgggaaactgcctcaggcctggaaaattccaggcatgacactaatcccaccctggctgagtccttctgtcaggtggaggctaagctggcattggagaagtttgagacacagccaagagctcaggctctgggagcctcccatcctttgttgcgtgaccttgggcagccctgttctgggccagcggcccttctggggcttgctgtcttgatctcaacatcgggttccacattgatgtgggaagtgacgctgtgcaggtgctggggtcagcctatggggccctcctttgtcccagagagcccaggaccaggaggaagccaggactaggtagtagttacggctttttgaaacagggtcttgctctgtcgccctggctagagtgcagtggagagatcgtggcttactgtagcctcgacctcctgggctcaagtggtcctcctgcctcagcctcccaagtagctgggactacaggggcaccaccacactcagggcaaggacacagcctttcctctacctgtggaggagctgtgtggtttccaggaaaccaggccttttccagcctcacctgtggggtgttgtaacacccaggaacttggagaggcgcccagaacctgggcagggtcagcacacaagcacccattctgcgtaagacccaggcctgaggacagccctgtagaccacagaaccccacgggtcccgtccccaacaactggctccttcccaccctagggccttcgcacttgcctggaatactacagattcccccaggctggcctcactcgagttttacaaactgcacgtgggttcccgggactgggctatatttgatttctatcccccactagttctgagagggcaggggctgtgtgtgtcacccagtgtatccaggaggggctcaactttccatggtatcctttttgtttcgtgaaagctctttacatatgcggggcaaaagcttgagaagagtcatacattttcccaggatatctttctttttttgagacggagtcgcgcttggttgcccatgctggagtgcagtggcacagtctcagctcactgcaacctctgcctcccaggttcaagggattctcctgcctcagcctccagagtagctagaattacaggtgcctgccaccacgcctggcaaattttttgtatttttagtacagacggggtttcaccatgtgggccgggctagtctggaactcgacctcatgccacctgctttggcctcccaaagtgctgggattacaggtgtgagccaccccgcctagcccaggatatcttttgatgttccttagagtatattggatggggggtgctagctggaaatcttaaaattttgcctgaatttcattcatcttgtggtttctagtacaaactctcctttctccataagggaatcttcatacttaagtgccacccagaaaagaaaatacatttcctaacctccatagctatggccaggtgtggctcatggctgtcatctcagcactttgggaggctgaggtaggaggatcacttgaggccaggagtttgagaccagactggtagacatagtgagaccctgtctttaccaagtaacattagctgggtgttgcggtgcacacctgtagtcccagctacacgggggcctgaggtgtgagaatcacttgagcctggaggttgaggctgcagtgaaccatgatcatgccactgtactccagcctggaaacaagacgagaccaaacaaaacaaaaatacagtactgatgtgccatttctgagaaagaacgcctctggctggtgtggacatgatggccagtgctgcagcagtcattttggactatgaagaagcaacacacaggagcagtgagggagaaggatctccggtacttgaccctgtgcagtgctgcccccgtccctgaggcttgacccttctacccccttgattagaacacggggaggagacatgagtcctgcttaggctgtaatggagctgctctgttagatgtgaccttaccttaccttgagctgggcctgaagcagggcgtggcactgtggactcaggccgtaactgcctggaagtccctgccctctctgagccatttcttcctgtataaagtgagggcggtgatccctccaggctgcagggcaggcgaggtgatattaggtgagttggaggatgagagatcaggagagtggaaggctcacggccccaccaaagcccactgcataccctcatctccacctcagtcccctccctgtgccttggagcccctccagggcttcaaccacgtggcagcagcctgggaaccacttgggagagctctgccccaaccagctgagacatggaggccaatcccattattgaggggccattgacaggatgaatgtgctcccagatcactagcctgcacctattcacctaccttggcacactcagcctctcataaatgtgcccagaagcccctctaccaccgaattcccccaccccctgccaaaccccatccttccattcagtcagattcctccaccatccaaccagctacctgtccatccattcgtccactcaatccacccaccccatccattcatccttccactcatccacctacccatccatccatccacccaaccatccagccatccatccagctatccacccacccacccatccatcaactcacccatccatccatccacccatctatccatccatccatctacccacccacccatccacccacctgcccatcaacccacccacccatctatccatccatccatccattcacccattcaaccacccaccagtcgatacatacatccatttatccatccatccatctatccacccacccatccatccatttacacatcctcccatctgtcatgtcaaatcctctacccaaactccacgcgcccacccccaccccacacacaccatccctttgttgcagcctcaattgtccttgagtccctactttgtgcaggggcctgcgttaattccggtgtgggtgattgaaggaatagacagaccctggttctttctcaggagggagaggaacagtcacaaccccatgcagaggctgggcgtggtggtggtgtgcccatagtcccagctacttgggagtctgaggcaggaggatcacttgagcccagaaggttgaagttgcagtgagccgtaacctctccactgcactccagcctgggcaacagagcgagcccctgtctcagaaaaacaaatagaaaaaataagcaaacaaaaagaactgcccctggctgttgagagaaggtacaagaccaaccagagcaaaagccctgggtctgggcagaaatggatcctttcacgtggctgtgagtggggccaataaggcagaggctggccagcgagaacctggatgtccgctggggtctggagcaggacaggtcctacccgggctcacccagttaacccaaggataagcaagggcaggaatccaggaactcctcccacctcctcaggtgctgaggcgctcctgggtctcgttcctgggcttgtcaaggtgccaggtgtcacctcagtagggccgtgatccctgggggagcgacattcaaagcctcccctccctgacccgccctgcacttctgctcctgagtcagaaccagtggggacaaaggcagtgccaaagcaggacagacgagtagggaccccaagagaccccagccccagttcctgcaaccaagagagactatatgagaatcacagaatctgagactcacagttgagtctcaggacttagaattatggaatctttttttttttttttttttttttgagatggagtttcactcttgctgcccaggttggagtgcaatggcatgatcttagcttactgcaacctctgcctcttgggttcaagcgattctcctgcttcagcctcccgagtagctgggattacacatgcctgccaccatgcctggctagttttttgtgtttttagtagacacggggtttcttcatgttggccagggtgggcttgaactcctgacttcagatgatccacctgcctgggcctccaaaagtgttgggattacaagcgtgagcaccgtgcccagtcgaattgtggaatcttacagacagcagcagcaacaaggaagaatagtttgcatttatttatttttttagagacagggtcttcttctgtcgcccaggctaaagtgcagtggcgcaatcaccgctcactgcagcctcaacctccccagctcaaccaatccttctgcttcagcctcctaagtagctgggaccacaggtgcacaccaccaaactcggctaacttttaaaaatttttggctgggcatggtggctcacacctgtagtcctagcactttgggaggcagaggtgggtggatcatgtgaggtcaggagttcgagaccagcctggccaacatggtgaaaccccttctctactaaaaatacaacaaacaaacaaacaaacaaaattgtagagttggggtctcactatattgttcaggctggtctccaactcctagcctccagccatcttcctggcttggcctcccaaagtgctgagattacaggcatgagccaccgaaactggcctttttgcacttgttgagtgcagagttgaagttcaaggacagattctggctccccatggcgtgggttcaaatcccactgtcactcctagctcacagaaggggaattgatgtccagggccacccagcaggtcgtgctgcagtcacagcagctcacaacttctcaccccaacccctgctgcatctcccagggaaccaaggggcaggggacagcgccccgacactgccaccactctcccattcctgcacattctgctcacattgtctgccgcggccttgggcccttcctaactcacatcctggggtcctgctgcccgcttctgtcattggaatcacagtcaaggaaggtgtgacctgattctccccactctgctgcttttcctctccaggctcacaattccctccgctagggcaggagatggtcctgcacactctgcaggggccttcactccaggcctccttaggaattccaaagtgctttccaaatccacccccctccccccactcggcagccaccccactcccgccacttggatatgacccatttttcagaatctagaaatctcatcagactcctcacctgctccaaactctcctacagttccccagcaccctcagaacaaaatccacaccccttccggaggcccagaagataccccgtgattgtctgtctctgctcaacctgtatccaggctggaattcactggtgtgatcactgctcactgcagccttgacctcccgggctctggcgatcctcccacctcagcctcccaaagtgctgggattataagtgtgagccacagtgcccagctgaaatcagtatttatctgctggtgaggtcagggccatcaccaccctggggtgggtccacctggatcatgctgtgtccccagcacctgccggagggccctgcacacagtatgcactcaatgaaccggcctcagcccaggcctctggccgcagcctggaccccacggtgggaagaagagaagctatgccttcccagaacttccctggagagaaggggtccatttacatgtatttgcacaatttgcatatgtttacattggtcggcagggctttgcaagtaggggatcccgctcggatctcccattgattgattgattgattgattgagacagtctcgctctgtcgccaggctggagtgcagtggcacgatctcggctcactgcaacctccgcctcccgggttcaagcgattctcctgcctcagtctcccgagtagctgggactacaggcgcgtgccatcacgcccggctaatttttgtatttttagtagagacggggtttcaccacgttggcctggatggtctcgatttcctgacctcgtgatccgcccgcgtcggccccccaaagtgctaggattacaggcgtgagccaccgcgcccagccttgatttttatttatttatttgtttatttatttattttttgagacggaatctctctctgtcgcccaggctggagtgaagtggcgcgatctcggctcactgcaacctccacctcccgggctcaagcgattctcccgcctcagcctcccaagtagctgggattacaggcggccgccaccacgcccggctaattcttgtatttttagtagagacggggtttcaccatgttggccagactggtcttgaacggatctcaagagacccgtccgcctcggccccccaaagtgctgggattacaggagtgagacaccgcacccggccggatctccccttttccaacggggtttccaggaggatgcctgaccagggtggaaggagaaagaactaggtgcctaacccactctcctggcgagggcaggaggtacgctccagccggcaacaggtgcccgcgtagccgccgcagtgtcacagccccgggggagggacaggtccaccctgcacagcagagagggagcaagaggactgtccgggggttacgtggggacgcgttgagaaacgctggacccagctggagcggccagggcagagggtaggccagaggaggccaccagggagcagcagaggctggcgagaagcgctcaaaagccctttttttttttttttttttttttttggagacggggtcttgctgtgctgcccaggctggagtgctgtgcagttctcgaccacagctcattgcagcctcgaacttccacgctcaagcgatcctcccacttcagcctcctgagtagctgggattacaggcatgtgccaccacgcctcgctaatatttgtatttttcatacagacaagatctcactatgttgctcagggtagtctcgaattctgggactcaaatgatcctcccacttcagcctcccaaagtgctgggattacaggcataagccatcatgcccggcctctgacgctgtttctttcaacccccaggatttcagattccaccagcttatggagaagggaaccaagtttgagatgcgtgattgcccagaaagttggaggctgagctgagacttgaacccagagaccagaacctccagaggtcaaagtcctcctgggtcccccagagaagggccctgagatgacagctcgttggtcctcatggaagcgtgacccccccagtagactttctcccacacccaaccttggtttcctcatctatatgatagggacaagccagactctacctccctggtggtcatggtctccgcttattcgggttcataaccttaaaggcccctcgcaccacctcagtgagccatttatgcctggcacagggccaactctcagtgcatatctgcaaaggaaccaatgaatgaatgaatgaagtgacaaatgaataaaggaataaatgaatgaggcacttatcatgtaccaggctttcgttaccacgtcccatttattcctctgaggcagggtctattttatccttgttacagatggggaaactaaggcccagggaggagcaaagtcttccccaagtatgtacccactcagaacttgagctctgaatgtctcccacccagcttagcccaagagcggggttcagtgatgcccaccccctaaggctctagagaaagggggtaggcccacatgccagtttgggggtggtaaagccaggtaagttttctttatgggtcccctgaaaccctgaaagtgaaccccagtcctgcatgaaagtgagctccccatagctcaaggtattcaagcacaatacggctttgagtgctgaagcaggctgtgcaggcttggatagtgacatgccctctctgagcctcaatttccccacctgtcaacagcagacagtgacagctgtgatcaggggatcacagtgcatggggatgggtgggtgcatggggatggaggggcatttgggagccctccccgataccaccccctgcagccacccagatagcctgtcctggcctgtctgtcccagtccagggctgaaagggtgcgggtcctgcccgcccctaggtctggaggcggagtcgcggtgacccgggagcccaataaatctgcaacccacaatcacgagctgctcccgtaagccccaaggcgacctccagctgtcagcgctgagcacagcgcccagggagagggacagacagccggctgcatgggacagcggaacccagagtgagaggggaggtggcaggacagacagacagcaggggcggacgcagagacagacagcggggacagggaggccgacacggacatcgacagcccatagattcctaacccagggagccccggcccctctcgccgcttcccaccccagacggagcggggacaggctgccgagcatcctcccacccgccctccccgtcctgcctcctcggcccctgccagcttcccccgcttgagcacgcagggcgtccgaggacgcgctgggcctccgcacccgccctcatggaggccgtggagaccggggaacggcccaccttcggagcctgggactacggggtctttgccctcatgctcctggtgtccactggcatcgggctgtgggtcgggctggctcggggcgggcagcgcagcgctgaggacttcttcaccgggggccggcgcctggcggccctgcccgtgggcctgtcgctgtctgccagcttcatgtcggccgtgcaggtgctgggcgtgccgtcggaggcctatcgctatggcctcaagttcctctggatgtgcctgggccagcttctgaactcggtcctcaccgccctgctcttcatgcccgtcttctaccgcctgggcctcaccagcacctacgaggtaccggacagaggcccgggggtaggacctgccccactggcagtgctgggaccccgtgtgggggaggcgctggggctttgggccgctgtacaggaggacgcggatggcacctcggtgctttaacggaaggggcccctaggcagacacgtggggagggttctaggaagaggccccaggcgcccggcgaggggcaggaaggaggaagagagagcctggcgtcctgctccttcggtggaagcgcgcgcggggcggggcccggctcgaccaggtgtgtcctcacgggtggacacacacctgccccccacctgcccgggcgtgcagacccacgtgtgcgcgctagaggggactgctgacggctccggggttcgaaacctggcttcactgctttcttgtatcttgggcaaggggcgtgcctctctgtttgggtttcccagctgtccaatgggcgaattacaggacctccctccaggggagagggtaaagcgattaaaatcgtgaccggggcccggtgcggtggctcacgcctgtaatcccagcactttgggaggccaaagcatgcagatcacctgaggtcaggagttcaagaccagcctggccaacatggcgaaaccccgtctctactaaaaatacaaaaattagccggatgtggtggtgggcacctgtaatcccagctacttgggaggctaagacaggagaattgcttgaacccgggaggttgcagtgagccgatatcgcgtcactgcactccagcctgggcgacagagcgagactcttgtctcaaaggaaaaaaaaatattgtggcagggcgcagtggctcacgcctgtaatcccagcactttgggaggccgaggtgggtggatcacgaggtcaggagttcaagaccagcctggctaacatggtgaaaccccgtctttactaaaaatacaaaaattagccgggcatggtcgcgcgcgcctgtaatcccagctactcaggaggctgaggcagaagaattgcttgaacctgggaggcggaggttgcagtgagccgagatcgtgccagtgcaccctagcctgggcgacagagcgagactccgtcccccctcccccccaaaaaaatcgtgacaggtatatcctaggcggccaacaccattggcccggggcactgtctacactgtgcgcttgcgggccacgtcggtgtctgctgagcggtggctgctccaggagcccgcgcccgtcaggcgcaagtgggagggcgcgtgcacacgcatggaccagtcctccaggtccacggggtacgcacaggcacgggatggcacctgtgcacgggtgtgtgcgtgcggcggggcccccacgtgcaagaatctggcgggcgcggttggcttccggagggaggggcccacctagagagcagaccagggacccgagaggcctcggctcctgggtaaggactgtccaggtgacctcgagtccctccttgcagtacctggagatgcgcttcagccgcgcagtgcggctctgcgggactttgcagtacattgtagccacggtgagtggcctcggccccgccctccgctcagggccccgagagcgtcagccttcactagcccggcccccaccattcaagaccccgcccagaccccgccccccatgctcccgttctgaccccgcccccatcagtcccctcccacaccacagccggcctgaccccgcctgcactctggaagacccggcctatctgccccgcccatattctgggaccacccttctgcctcctctccccatccccaactcgcccagacgccctccctgctcacccgccccacactctgtctacagatgctgtacaccggcatcgtaatctacgcaccggccctcatcctgaaccaaggtgtgactctgggagattagggaagcatgtctgggaagagaaagggagggagaggagaacccaagactaagtttgcgccccgcccaggggcctaacagggggacctctttttgcatagtgaccgggctggacatctgggcgtcgctcctgtccaccggaattatctgcaccttctacacggctgtggtgagtggccctgggaactcactccatacgggggatcgggcccactgtgtctcttgtggggagactctgggcttgcccctttctcctgaggaagcctctgtcccagctgggacccagtgtcctcatctttatagtgaaaaatgatctgaaaagcttattgctgagaatctagaggtatggtagcttcaggcatggctggatccaggcttccacctcttctggcttccagtccagcaggaagtgagctcctgcttcatcctggggctggctgaggtcccagggagggctacctttggctggctcaggtctgaccttgatggcgatattatcatcgtagtgataataatagtaatggcggccgggcgcggtggctcacgtctgtaatcccagcactttgggaagcagaggcaggcggatcacctaaggtcaggagttcgagaccagcctggccaacatgatgaaaccccgtctctactaagaatacaaaaattacctgggcgcagtggcacgcgcctgtaatcctagcctctcaggaggctgaggcaggagaatcgcttgaacccgggaggtggaggttgcggtgcgtggagattgcgccattgcactccagcctgggcgacagagcaagactccatctcaaaaaaatataataataataataataatagtaatggcagcaatcactcactgacactcgtatatgtcaagtcatattccaaatctttttcacttattaacttgtttaattctactgggcacagtggctcatacctgtaatcccagcactttgagaggccaaggtaggaggatcacttgaggccaggggttcgagaccagcctaggcaacatagtgagacccccccccgcccccatctctacaaaaaaaattttttttaaattagtcgggcatggtggcacctgctgtagctccagctactccggaggctgaggcaggaggatcacttgagcctaagagttccagtctgcagtgagctgtgatcacaccactgcactccagcctgggcaaaagacagaaaccttttctttaaaaataaaataactaacttaattcttacaacaacacagtaagaaggtattattattaatcccactttagagaggaggagactgaggcatagaagggcatcagtcctaggcaccactgaaggccaggtcccccatctaaccgcccctctccctctctctgtcccatgctgcagggcggcatgaaggctgtggtctggactgatgtgttccaggtcgtggtgatgctaagtggcttctgggttgtcctggcacgcggtgtcatgcttgtgggcgggccccgccaggtgctcacgctggcccagaaccactcccggatcaacctcatggagtgagtgaaaatgcagaggatactccagcaggatggggctgggaccagtgcggtggctcatgcctgtaatcccagcactttgggaggccgaggcgggcagatcacttgagctcaggagttcaagaccagcctgggcaacatggtgaaaacccatctctacaaaaatacaaaaattagctgggcgtggtggtgcacctgtggtcccaggtagttgagaggctgaggctggaggattgcttgagcccggtaggtggaggctgcagcaagctgagatcacactactgcactccagcctggatgacagagctagaccctgtctcaaaaaaaaaaaaaaaaagaggctgggtgcagtggttcatgcctgtaatcccagcactttgggaggccaaggcggggggatcacctgaggtcaggaatttgagaccagcatgaccgacatcgagaaaccccatctctactaaaaaatacaaaattaggctgggcgcggtggctcacgcctgtaatcccagcactttgggaggccaaggatggcagatcatgaggtcaagagattgagaccatcctggccaacttgatgaaagtccgtctttactaaaaatacaaaaattagctgggcatgctggcaggcgcctgtaatcccagctactcaggaggctgaggcaggagaattgcttgaacccaggaggcagaggttgcagtgagccgagatggcatcactgcactcccgcctggtgacagagagagactccgtcccccccctaaaaaaaaaaaaaattagcagggcgtggtggcgcatgcctgtaattccagctactcggggaggctgaggcaggagaatcgcttgaacccaggaggcggaggctgcggtgagccgagatcacaccattgcactccagcctgggcaacaagagcgaaactccatctttaaaaaaaaaaaaagaggatggggctgggctccctttgtgccgtgggatggtagaaatcagccaatgcctcctgctccaggaggccctcgctgctctcttctcctcccctcagaccagattgggggctaaagcctctctgaactctcagctgggcaaagaaaggtttttaagtgcgtggatagatgattcagtaaacaaatacgtgaattttcaatctggcaaatgcctatgcatatgtcaaacccactccatttattatttatttatttttaatttaattaatttttttttttttgagatggagtctcgctctgtcacccaggctggagtgcaatggcacgatctcagctcactgcaacctccgcctcctgggttgaagtgattctcctgcctcagcctcccaagtagctgggattagaggcacccgccattattcccagctaatttttgtatttttatagagatggggtttcaccatgttggccaggctggccttgaactgtgacctcaggtgatccatccgccttggcctcccaaagtgctgggattacaggcatgagccactgcgcctggccaacaaaacccactccaaatgtcccctataaggtccagaagcgctgtctggggcccttgggagggtgaagtcagcgtgacatctccacgtggctaacttgccctgtccccacccagctttaaccctgacccgaggagccgctatacattctggacttttgtggtgggtggcacgttggtgtggctctccatgtatggcgtgaaccaggcgcaggtgcagcgctacgtggcttgccgcacagagaagcaggccaagctgtgagtgtttcggggagcaaggtcggggtttctgggacatgctgcccccctccaccagcctgaggctatcccctaagcctgaggctgcctcttcccccagggccctgctcatcaaccaggtcggcctgttcctgatcgtgtccagcgctgcctgctgtggcatcgtcatgtttgtgttctacactgactgcgaccctctcctcctggggcgcatctctgccccagaccaggtgagtcccacccaggctcctggttggctctgcactccctcactagcttggtgggattgaggtcgaagagcattcctagcagagggaatggcctgtgcaaaggccaagaagtaggaaagagctgagaggaggccaggtgcggcggctcatgcctgtatcccagcactttgggaggctgaggcgggtggatcacctgaggtcaggagtttgagaccagtctggctaacatggtgaaaccctgtctctactaaaaatataaaaattagctggacgtggtggcacgcacctgtagtcccggctactcaggaggctgaggcaggagaatctcttgaacccgggaggcggaggttgcgatgaagggagatcgcaccactacactccaccttggatgacagagtgagactctgtctcaaaaaaataaaataaaataaaataaagagttcagaggaggatctgcaaggaatgggaaaggtgagtctgggaggcaatggaccgccctcagtaggtgtgagcagacaagggccacattcagatctagagttccagagagttccaaagatcccctgggagatgctcaggaggagatgaaaccatgacccaggccgggcatgttggctcacgcctgtaatcccagcacttttggaggccgagacaggcagatcacttgaggttagaagttcgaaaccaacctggccaacatggtgaaacccccctccactaaaaatacaaaaattacctaggcctggtgatgcatgcctgtaatcccagctactcgggaggctgaggcaggagaatagcttgaacccgggaggtggaggttgcagtgagcagagatcgcgccattgcactccagcctgggtgacagagagagactccatctcaaaaaaaaaaaaaacaaaaaaaaaaaaccaaaacaaggctgggcgcggtggcttacgcctataatctcagcacttttggaggctgaggcaggggtatcacctgaggtcatgagttgaagaccatcctgaccaacatggaaaaaccccgtccctactgaaaaatacaaaattagccgggtgtggtggtgcatgcctgtaatcccagctactcgggaggctgaggcaggagaatagcttaaacctgggaggcggaggttgcggtgagctgagatggcgccattgcactccagcctgggcaacaagagagaaactccgtctcaaacaaaaataaaaacaaaacaaaacaaacccacaaaaacaaaaacaaaaactgtaatccagcgggaactaatcatgttggtgataataataatgacagctctggtctcccatgtcccaagcgtccactctgtgcctcatgctgttcccttcaccagcagttagttctccatctaatctttcttctgagaaaggcagggcagtcacggctccaactttacagatgaggaaattgaggctcggggggaagtcactgcctgaggtcaatgggcaagtcggggggcggtgccaggacccatgcctaggtcacaccccaagtagagttctgaccatggggttcagagttagcagagggtacgggggaccaccccatctgcagtcctccctggaggtcagatccgggactgctggactgtgtaacttcagggagggactgtactctctgcctcacagtcttcatcaataaaatgaggatgacacgggtccctgcttcacagggatcccagggctcagaacacagtggggctcagggacaattctcaggttcatgcagttgatcaacaaatgcacattatagcctgaggaacatagggagaccccatctttacacaatttttttttttttgagccagagtctcactctgttgcccaggctggagtgcagtggcgcaacctcagctcactgcaacctctggctcccaggatcaagccattctcttgcctcagcccccgagtagctgggatgacaggcatgcgccaccatgcccagctaatttttttgtattttttgtaggggtggggttttgccatgttggccaggctggtctcaaactcctgacctcaggtgatccacctgcctcagcctctgaatgtgctgggattacaggcatgagccactgtgcccggcctttctttcttttctttctttttttttttttttgagacagagtttggctctgttgtgcaggctggagtgcaacggcgcgatctccgctcgctgcaacctctacctctcagattcaggcaattcctctgcctcagcctcccaagtagctgggactccaggtgccaaccaccacacccagctaatttatgtattttgggtagagatgaggtttcaccatgttggccaggctggtcttgaacttctgagctcaagtgatccacccgcctcggcctcccgaagtgttgggattacacgcgtgagtcaccctgcccggccagacccctatctttacacaaaaatttaaaaaaattagccaggcatggtggcgcacacctgtggtctcagctactgggggactgaagcaggaagatcgcttgagcccaggagttctaggctgcagtgagccacattcatgggactgcactcccgcctgggcaacagagcaagatcttttctcaaaacaaaacaaaacaaaacaaaaccacagacaaaaactaaatgcatattaaatgccgactctgagccctgtccgtcttgggtgctggggacgtgcagcatcaggacagatagatgccccggtcctcggggtgcagctgtctgggaggctgacccccagttctccccagtacatgcctctgctggtgctggacatcttcgaagatctgcctggagtccccgggcttttcctggcctgtgcttacagtggcaccctcaggtgagcacccctgcttgttcatggagcattatttcagcccctgggagcctccttatcctggcctgccatccctctggggcatggaatgttctggacctgtccatcagtcccagttcctgcttgatccctagaagacagctcaggtaggcgctggcagagagcatgccctgggcacagggaccccaactgcaagggtttaccttcttatcacctgtcagggccacgcctgactctcctctcttcttcttccttctttccttccttcctccccagacaaatatttgttgaacatctactatgtggcaggtactgtttttttttgttttttttccggatggagtcttgctctgtcacccaggctggagtgcagtggtgccatctcggctcactgcaacctccacctcctgggttcaagcaattctcctgcctcagcctcccaagtagctgggattacaggtccacgccaccacagccggctaatttttgtatttttagtagagacggggtttcgccatgttggccaggctggtcttgaactcctgacctcaggtgatctgcatgctttggcctcgcaaagtgctgagattgcaggcatgagccaacgtgctcagcccaggtactgttgttctaaaccctggggcacagccatgaccaagcagtcccctgcttctgccttccaaggccacacactcaggtggtttccactcttccgggacttctggtcacatgccctcactgtcccttttgcaaatctcccacatgtgactgcagtccctctggaaccagaacccacctgtctgtcccacctgcccttggtcacaggtgtccttgctcctgtagggatgtctcaggtcttcggggaggggaggggcaaatatctccttcacctttgcaggactgggttacccccaccgttgccctcaggctgggtgaggtctggcaggccagatggtgtggacggtctctccatatggcctgaggaccccccgctgccttcctcacacagcacagcatccaccagcatcaatgctatggctgcagtcactgtagaagacctcatcaaacctcggctgcggagcctggcacccaggaaactcgtgattatctccaaggggctctgtgagtttcagggagacctgggtgggaggccagggcagtccctccccgttgaccgtgccatcctcatccactacagcactcatctacggatcggcctgtctcaccgtggcagccctgtcctcactgctcggaggaggtgtccttcaggtgagaccccacctgccccctgccctggtctcctgagaggtgggggcacctttccctctttcccattaaactgaggctcagagaggtcacatgtgtcagtggcagaactcacttctatgttttttttttttttgagatggggtctcactgtgttgtcccaggttggtgagcagaggcccgatcatagctcactgcaacctccagctcctgggttcaagccatccttccacctcaatctcccaagtagctggagttacaggtgtgtgccaccatgcctggctaatttttttcttttttcttttttttttttttttgaggtggagtgtcactctgttgcccaggctggagtgcagtggcatgatctcagctcgctgcaacctccaccccctgggttcaaggaattctgcctcagcctccagagtagctgggattacaggtgcatgccaccatgcccgtctaatatttttgtatttttttttcttgagacggagtctcgctctgttgcccaggctggagtgcagtggcaccatcttggctcactgcaagctcagcctcctgggttcacgccattctcctgcctcagcctcccgagtagctgggactacaagcgcccgccaccacgcctgactaattttttgtatttttagtagagatggggtttcaccgtgttagccaggatggtctcgatctcctgacctcgtgatccgccctcctcggcctcccaaagtgctgggattacaggcgtgagccaccgcgcccagcttatatttttgtatttttattagagatgggacttcaccatgttggccagtctggtctcgaactcctgacctcaagtgatccacccgcctctgcctcccaaagtgttgggattacaggtgtgagccaccacgcctggcctggctaattttaaaacttgtttttagagacagggtctcgcttcgtgcctaggcttgtcttgaactcctggcctcaagcaaccacccgcctcagccttccaagtcgctgagattaagaactaagttctatttgatgccagaggccatcaggggacttttttgcagctggctggcttggggtgggggaattgggaagggggaggtggcgacagaaagggcctccctatggaggttgcagtgagccaagatcgcgccactgcactccaacctggacagcaaagtgagactctgtctaaaaaaaaaaaagaagaagaaagggtctccctggcttgagggtgggactgccacccccaagagataatcagtgtctttgcctccaacccaagggagataggcaggaacaaggggggggggtcctctcccctttagggaaactgagacacagaggagtccttgagacccacattggagttcctgaggtctcgctttcccagcgggtaaactgaggcccagagcggtgggagggctccgccctcagccccacttccacctactctcccagggctccttcaccgtcatgggagtcatcagcggccccctgctgggagccttcatcttgggaatgttcctgccggcctgcaacacaccggtgagtgggggcggggcaaggggcggggaggggcggggccggacaggcccctccccttccctgacgccggctctgcccccagggcgtcctcgcgggactaggcgcgggcttggcgctgtcgctgtgggtggccttgggcgccacgctgtacccacccagcgagcagaccatgagggtcctgccatcgtcggctgcccgctgcgtggctctctcagtcaacgcctctggcctcctggacccggctctcctccctgctaacgactccagcagggcccccaggtgagcagacttgagggtaggggggtacccgagccctggatggtgtgatcttgaagggaaacttacttgccctgcactctgtgtaagaagcctgattagtaaaatgcattcctgggggagggaacggtaggtgcaaaggccctgaggccacaatcgggttagtcccagtccaactgcactgaggttagggtgcatttaatgggaggagagatgggtgggagatatggtgcagccagaggaagctagtactttttttgttttgtttttctgagacagagcctcgctctgtggtccaggctggaatgcaggggtgcaatctcagcttactgcagcttcaacctctcaggctcaagcaatcctcccagcttgagggaggcccagaatttggtttggttctattttttattgagataaattagccatttaaaagtggcatttaggccaggcaggcacagtggctcacacctgtaatcccagcactttgggaggctgaggcaggtggatcacctgaggtcaggagttcaagaccagcttgatcaacatggggaaacccccgtctctactaaaaatacaaaacttagccaagcgtggtggcaggtgcctgtaatcccagctactcgggaggctgagacaggagaatcgcttgaacccaggaggtggaggttgcagtgagctgagatcgcaccactgtattccagcctgggcaacaaaaatgaaactccaactcaaataaataaattaaagtggcatttagtatatttgtgcaaccatcaccactatctaagtcaagaacgtttcctcttttttttttctaattttgtatttttagtacagatggggtttcaccatgttggccaggctgatcttgaactcctgacctcaggtgatccgcccacctcagcctcccaaaatgctgggattacaggtgtgagccactgtgcctggccccaaaaacattttctatttttttttttttttggagcagggtcttgctctgttgcccaggctggagtccagtggcacgatcatagctcactgctgcctcaacctcctgggctcaaggaatcttcctacctcagcccccctagttgctgggaccacaggtgcacaccatcatgtcctgcttgtttttatttttattttttgtagagacagggtctggctatgttgcccaggctggtctggaattcctgggctcaagcgatctgcccacctcagccttgcaaagtgccaggatgacaggtgtgggcacccagccaaccaagaacattttctgttttgtttatttatttatttatttattttggttttttgggtgggtttttttgctttttgtttatttgattttttggagacagggtctcactctaacacccaggctggagtgcaatggcacaatcacagctcactgcaccattgacctccagactccgatgatcctcctgcctcagcctcccaagtagctgggactataggcatgtatcaccatgctgggctaaattttttgtattttttatagagacgagtttttgccatgttgcccaggctggtctcaaagtattgggctcaagtgatctgcctgcctctgactcccaaagtgctgggattacaggtgtgaggcactgttcctggtcataagaacatttttatcaccccagaaagaagccctgtccccatcagcagtcacttcccacttccccctctccccagctcctggcaagcacgaatccactttctgtttctatgaatttgcctgttctgggcatttcatgtaaatggaatcataaaatatgtgatcttttgtgtcttagcataatacatatatattttttgagacggggtttcactttgtcgcccaggctggagtgcagtggcgtgatcccagctcactgcaacctctgcctcccaggttcaagcaattctcctgtctcggcctcctgagtagctggggtcacaggcatatgccaccacgcttgggtaatttttgtatttttagtaaagatggggtttcaccatattgatcaggctggtcttgaactcctgacctcaggagatccacacatcttggcctttcaaagtactgggattacagcagagtacagtggagccactgcactccagtctgggtaacagagtgagactccaccaaaaacaaacaaaaccaaaaacatttgtgaacaagttttggtatggacatatgttttaatttctctaggtatatacctatgagtggaattgctggatcatatggtaattctttaactttttttttttttttttagatggagtcttgctctgtcgcccaggctggagtgcagtggtgtgatctccactcactgcaacctccgcctcctgggttcaagcgattctcccgcttcagcctcccgagtagctgggactacaggcatatgccaccacgcctggctaatttttatatttttagtagagaaggggtttcaccatgttggtcagggtggtctcaaacccctgacctcagatgatccgcctgccttggcctcccagggtgttaggattacaggcctgagccaccacgcccggcctatgtttaactttttgaggaactaccagactgttttccacagcggccacatcattttacattccgaccagcaacatatgaggattctaacttctccacgtcctcgccaatactcattattctccatcctagtgggtgtgaagtgatacctcactgtggttttgatttgcatttccctgatgaataatgatgttgagcatctttcttttcattggccatttgtgcatcttctttggagaaatgtctattcaaaccctttgcccatccagcctgggtaacatagaaagaccctatctctataaaaataaaaatgaaaaaattagctgggcatggtggtgcacacttgtagtcccagctccttgggaggctgaggcaaagaggatcgcttgagcctggggggccaaggctgcagtgaagcatgatcccaccactgcactccatcctaggcaacagagcaagaccctgcctcaaattaaaaaacaaacaaacaaaaaaacaccctttgcccatttttaaattgggtgatttgtctttttattgttgagttataatttacatatttttatatctttatgtattctgggtacaagcccctgatcagatgtataatttgcatgtgatattttctcccattctgtaggttgtcttcattctctcgatagaatcctttgatgcacagaagtttttaattcttttttttggtgggcggatggagtctaactctgtcacccaggctggagtgcagtggtgcgatttcagctcactgcaacctccacctcccaggttcaagggattctcccacctcagcctcgtgagtagctgtgactacaggtgcacaccactatgccaggctaatttttatatttttagtagagatggggtttcaccatgttagccagcctggtttcaactcctgacctcagcctgcctcagcctcccaaagtgctaggattacaggcatgagccaacatgcctggccagaagtttttaattttttttttttttttttgagatggagtctcgctctgttgcccaggctggagtgcaatggtgtgatctcggctcactgcaagctccacctcccgggttcatgccattctcctgcctcagcctctcgagtagctgggactactggcacccgccatcaggcctggctaattttttattatttttttatttttagtagagacagggtttcaccatgttagccaggatggtctcgatctcctgacctcgtgatccacccgccttggcctcccaaagtgctaggattacaggtgtgagccaccacgcccagccagtttttaatttttgatgaagtccaattgatttatttttttctttggtggcttttgcttttggcgtcatatctaagaaacaattgcagtcacgaagattcccacctatgttttcttctgagagtttaatttggtttgattttgagggtgacagggagccacagagggtgacgggcagcagcaggtgatctgagttacattttagtaatgtgccctttggctgtgtgtggaggacgtctagggtggggatgggatacctggagggaaggaacattggctactgcacagatctgggcagacagtaatggaggtctgtgctaggccatggcagttgggggaaggaagcagggggtgaggttggaacagcttttgagtgcaggcaggggataaaagaggaggttcaagtctgtctctcccaacctgcagctcaggaatggacgccagccgacccgccttagctgacagcttctatgccatctcctatctctattacggtgccctgggcacgctgaccactgtgctgtgcggagccctcatcagctgcctgacaggtaggtaaacagagcatgtggcctcagaggtcatcccattcatctctctgcctcaaggctccacccagcagggaggggagaaaggacgctcccattggccaaactgccactgtgtgctgtacacatttgtaccttattattattattattattattattattatcatcatcatcatcatcatcatcatcatttttgagatagagtctcactctgtcacccaggctggagtgcagtggtgtgatctcagttcattgcaacctccacctcccagattcaagcgattctcatgtcacagcctcccgagtagctgggattacaagtgtgtgccgccatgcttggctaattttgcatttttagtagagacggagtttcgccatgtgtctcgaactcctgggctcaagtgatccgcccacctcggcctcgcaaagttctgggattataggtgtgagccactgcacctgggctgtacctatttttttaaaaggaaaaaaaaagtttgtgaggaaaaaagaagtgtgtgtgtatatatacacatacatacacacttttatgtgtatatatacataaaagaaattatgaatatatataaaaattatgactatatatatacataaaagaaagtgtatatatatatagtttcttttaaagggacggggtcgactgggcgtagtggctcatgcctgttatcccagcactttgggaggccgaggcgggtggatcacctgaggtcaggagttcaagaccagcccggccaacatggtgaaaccccgtctctactaaaaatacaaaaaaattagctgggcatggtggcaggcgcctgtaatgccagctacttgggaggctgaggtaagggaatcgcttgatcctgggagatggaggttgcagtgagccaagattgcgtcactgcactccagcctgggcaagagagtgagactccatctaaaagaaagaaagaaagaaggaaggaaggaaggaaggaaggaaggaaagagaaagagagagagagagaaggagagaaagagagagagaaagaaaagagacaggtctcactgttacccagactggagtgcagtggcacaatcatggctcactgcaaccttgaactcctgagctgaaagcaatcctcccacctcatcctcccgagtagctgagactacaggtgcgcgccaacgtgcccggctcacatttacaccctttaaagctatgttgctttcttgacaaccctgcacctctcagagcttgccctattttgcagaggcagaaacggaggcattgcctgcaactcctctccccaacaagattaagtcctcagtagaggatatgggttggggcgggcggcgctatccctggtgctgaaatatcttctaaagctgccggtgactccgcacttgttagggaattctaaattccacggaaaagtagaaggagacaaagaggggaaagtcagtagtgataacagtacctgctcacacttcttgagtctcagacttcacagtcatcaggcctttatcgagtcctcctctgtgctggacgctattttaggcactggggatgcagcagtgaatggaaccgtgtgctggaccctcccagccatccattaatgtctttgttttgttttgttttgtttttttgagatggagtttcactctggtcgcccaggctggagtgcaatggtgcgatgttggctcactgcaacctctgactcccgggttcaagcaattctcttacctcagcctcccgagtagctgggattacaagcgcccacccccacgcctggctaatttttgtatttttagtagaaatggggtttcgccatgttggccagactagtctcgaactcctgacgtcaagtgatcccctgccttggtcttccaaagtgctgggactacaggcgtgagccaccgtgcccaacctccaatgatgtttttgttttgttttgttttgttttgttttagaaacagggtctcactctgtcaccaagctggagtgcagtggcacaatgacggctcactgcagcctcgacctcttgggctcaagcaatcctcctgcctcagcctcccaagtagctgagactagaggcacacaccaccatgcctggctaattttttaatattttgtagagatgggttcttgctatgttgcctaggctggtctccaactactgggcaactctaagcaatcctattgccttagactcccaaagtgcaattatgagccaccatacctggcctcactgatgttttattacaacttcactgtgtagatgaggaaactgaggctcagaggcttgccagggtcccttagtgggactggagcctgttagacttcatagaccagggatctcctttctccttcccaggacctggtctccaacccccatgaccccttcactgaatgcctggatttctccatttctccccgcctctcaggccccaccaagcgcagcaccctggccccgggattgttgtggtgggacctcgcacggcagacagcatcagtggcccccaaggaagaagtggccatcctggatgacaacttggtcaaggtcagtcttaggctgggttcccagatctagaggcagccaagtgactttaggacgtgaccacagctcaggggagggacatggtatatcagcacctttctccatcgctcattatctccagtcaaaagactctattgggagctgattcatcctcaacagtttttatctcccttcacaaggactgaacagagtttaatactattcctttttgtttgtttgttttttgagacagagtctcgctctgttgcccaggctggagtgcagtggtgcaatctcggctcactgcaacctccacatcccgagttcaagcgattctcctgcctcagcctcctgagtagttgctactacaggcgcatgccaccgcacccagctaatttttatgtttttagtagagatggggtttcaccatgttgcccaggctggtctcgaactcctgacctcaaatgatccacccaccttagacccccaaagtgctgggatgacaggcatgagccaccgagcccagcctcatcttcaagtttttgttatctcccttcataaggactgaacaaagttgaatactattcctttttgtcgttatctgtttttacagtgacttccaatctttggcaggtgaaactggtgtgctgttagggtattgatgtaaagtctcttcttaaaataaaattacttaattcaaaagtgagtcaacttggggaaaaaatcttacataagaaacacaacagatggtaaaccgattttggctaaaaccgcgtggttgctttgtgaattcccagagtttggaaaatgctgtccctgggggacctgatcccatgcctacccctgttttggaatccctgttccattctctcatttattgagcacctgctgtgtacccagtcctgctctgggctatggtctaagacccccaccccaccctcatctagcaggggcaggtgaaaactaaaaagagaaacatgtagggtctgtctcagtatgtgataagcattcaaaagataatacaaccagatgctgtcaggccgggcacggtagctcacgcctgtaatcccagcactttgggaggttgaggtggatcgcttgaggccaggagttcaagaccagcctgtcgaacatggcaaaaccctgtctctactaaaaatacaaaaattagccgggcatggtggcgtgtgcctgtaatcccagctactcagtggaatgaggcagaagaattgaacaattgaacccgggaggtagaggttgtagtgagctgagatcgcgccactgcattccagcctgggtgacagagcaagacttcgtcaaaaagataggaaagcaggaagggagggagggagggaaaagaaggaaggaaaggaaagagccaggcgtgatggctcacccctgtaatcccagcactttgggagacttaggcaggtgcatcacctgaggtcaggagttcgagaccaccctggccaacatggtgaaaccccatctctactaaaaatacaaaaaattagccgggtgtggtggtgcatgcctataattccagctattcggaaggctgaggcaggagaatcgattgaactcaggaggtggaggttgcagagagcagagattgtgccattgcactccagcctgggcaacaacagccagacactgtcagaaagaaagaaaagacagagagagagagagagagagagagagagagagagagagagagagagcaagctaaaaagaaaaacgtgtagggtctcagcatgataaatattcaaaggataataaaaccggatgctgtgatggggagcaactttagccagggaagtcaggggtggcctcttgggagaggtgacattgattgaccctgagttaggagaagaggaaccagccacagacaggaacagctttgactgagaaggggattgggaggggaggggtttgcctgaaggtgtttaaagctccctccagctgccctagagaagtgtttatcttttctttctttcctcttttcttttcctttctcttcttttcttttttttctttctctctctttttttgttctttattattttatttttcttttttgttgtctttgttttatttgtgtgttttttttcttttttgtcttttttttttttcctttttttgagatagggactcactctattgcccaggctggagtgtagtggcatgaccatggctcactgcagccccaacctccatggtccgagaaattctcccatctttcaacctcctgagtagctgggattataggcatgcaccaccgagtctggttaatttttttatttttggtagagatggggttttgccatattggccaggctggtcttaaactcctgggctcaagtgatctgcccaccttggcctcccaaagtgctaggattacaggggtgagccaccgtgcccggccagaaatatttattttcttgaaggtgaacaggcagagaagcagagaaaggagggaggaactatagcaggcatctgagaaagcgttgatggcctgggctgtaggtgacatgtgagtggggaagagaagcgcatggaaattttggaggcagagcgggcaggactggcccgtgcactgagcaaggggatagtatgcaattctgtgcacgccccgtcccgccaggtcatcagtagcccatctgggagatgagctgacacggaacagggtggggacagggtctctgatggggtctctttttcccacttttccccagggtcctgaagaactccccactggaaacaagaagccccctggcttcctgcccaccaatgaggatcgtctgtttttcttggggcagaaggagctggagggggctggctcttggaccccctgtgttggacatgatggtggtcgagaccagcaggagacaaacctctgaggacagggccagccgcgggactgacaccctgggatggaacctcaggatgggccaaacccagacaacgggcccatggccttgggctctgattggctggattgccttgtatgcaaatgagttcaggactacaataccctaccctatggggaggccctgcctccgggaggtcattttttaaatccagccccttgcttcaaccgtccccagtattagacgctgcagccctgacggctccccccaaataaggctgggtttttctctctctcttttttttttttttttttttttgagacagggtcatgctctgtcacccaggctggagtgcagtggtgtgatctcggctcactgcaacctctgcctcccaggctcaagtgattctcctgcctcagcctcttgagtagctgggattgtaggtgcccaccaccatgcccagccaactttttgtatttttagtagagacagggtttcaccatgttggtcaggctggtctcgaactcctgacctcaagtgatccacctgcctcggcctcccaaagtgctgggttacaggcgtaagctaccatgcccagcctaccgtttttctcaatctataatagaaagccaccacgcccaggtaatttttgtaattttgtatttttgtagagacggggttttgccatgttggccaggctggtctcaaactcctgatctcaggtgatcctcctgccttggcctcccaaagggctgggattacaggggtgagccaccgcgccccacctctttcttattttcttcctgggattggggaggggatgattcagaccccacatggcctccaaccttggcccacacacctgccatggctcccatcatcctgagcatgctagcgtcccctcctcacctgacaatggaggctctcgaattgggttgtgtccccccaaaatttatgtctacccagaacctcagaacatgagcttacttggaaatagggtctttgcaggtgtaactggttaaattaaaagaggtattactggaggaggatggatgaatccagtgactggttcctcatatgaagtagagaagagatgcagagaaacacatggggaagatgccacgtgaagacagaggcagtggttggatcaatgcatctacgagtcggagaacccaaggattgccagcaacaaccagaaatcaggaggggggcatgagatgcattatttcttagagcctttagagggaacatggccctactgacaccttgatgtcagacttctggctgctagaactgtcagagaataaatttctgttgtttgatgccaccaggcctatagtggtttgtgacagcagccacaggagctcatacacctttttttttttttttttttttttttttttttttaaggcagagtctcgctctgtcgcccagactggagtgcagtggtgcgatcttggctcactgaaacctctgcctcccagattctccttcctcagcctctggaggagctgggattacaggcatgtgccaccattcccggctgacttttgtatttttagtagagacggggtttcaccatgtcggtcaggctgatctcgaactcctgacctcaagtgatctgcctgcctcagcttcccaaagtgctgggattataggcgtgagccactgcgcccggcctcatacacaccttctgatcccgcttctctccaccccttggagacctggtcctctgtgcccgctgttgggattggacacctttagatttggacttaaaactggccattacaactttaaaatcgatgactggacgggtgtggcgtctcatgcctgtaatcccagcacttcgggaggctgaggcgggcagatcactcgaggtcaagagttcaagaccagactggccaacatggtgaaaccccatctctactaaaaatacaaaaattagccgggtgtggtggcgggcgcctgtagtcccaggtactcgggaggctgaggcaggagaatcgcttgaacctgggaggcagaggttgcagtgagatcacgccactgcattccagcctgagtgacagagcaagactatgtctcaaaaaaatatatatatatgtatatgtgtgtgtgtgtgtgtgtgtgtgtgtatatatatatataaaatcaaatcaatgactgagcaacgtggtaagcagattttccacctctgtgtagtcctcactcaaaacagagcccaaatctgagatgggaggaggtgcccggggtagggatgggctaatgttcccccaagtgagcagaagaagcttatctggctgcagtatagagatccttccacggcgttattcattccgtttactgcggagtagtattccattgtgcaaaaggaccatagtttgttatctatacaccagttgatgtatgggttgtttgccacttttggctatgagaaataaagttgctatgaacattcatgtacgagtctttgtatggaggctgggcacagtgtctcacgcctgtaattccaacactttgggagaccaaggcaggaggattgctcaagaccaggagtttgagaacagcctgggcaatataacgagaccccatctctatagaaaaatttctttttttttttttttttttttgttttttttgagacggagtcccactctgtcccccaggctggagtgcagcggtgcgatctcggctcactgcaagctccgcctcccgggttcacgccattctcctgcctcagcctcccgagtagctgggactacaggcgccggttgccaccaagcccggctaattttttttgcatttttagtagagacgggatttcaccatgttagccaggatggtcttgatctcctgacctcgtgatccgcgtgcctcagcctcccaaagtgccgggattacaggcgtgagccaccgcgcctggccagtcatctctacttttgtaagcagacagggagggcctccaggtctacaggaatttttttttttttttttttttttttttgagatggagtcttgctctgttgcccaggctggagtgcaatggcgtgatctaggctcactgcaacctctgcctcctgggttcaagtgattctcctgcctcagcctcctgagtagctgggactacaggcatgtgcccactgcgcccagctaattttgtatttttagtagagacaaggtttcaccatgttggccaggctggtctccaactcctgacctccagtcatctgcccaccttggcctcccaaagtgctgggattacagtgagccactgcgtctggccagggattcaggaattctttttttaatggttttttctttctttctttcttttttgaggcggagtcttgctctgtcacccaggctggagtgcagtggcatgatctcagctcactgcagcctccgcctcccagactcaagtgattttcctgcctcagcctccctagtagctgggattacaggcatgcaccaccacagccagctagtttttgtatttttagtagagacagggttttgccgtgttggctaggctggtctcgaactgctgacctcaattgatccaccagcctcggcctcccaaagtgctgggattacaggcgtgagccactgcactcagcctggactacagaaatttaaccagcttgagcatatgagcctgttttacagccccctgccccatagcttgtttttttgtagaaaaaaaaacaagtagaaccccatgtagaatgtggtcacctggttggctggaaccagtttatgacagacctcagcaacttatagatggactggtgaactctaatttttaccgtgctaaagtttccaccctaggccaggagcggtggctcacacctgaaatcccagcgctttgggaggcagaggagggaggatcacctgaggtcaggagctcaagaccaacatggccaatatggggaaaccccatctgtactaaagatacaaaaattagccgggtgtggtgacacatgtctataattccagctactcgggaggctgaggcaggagaatcacttgaacccgggagccagaggttgcagtgagccaagatcgcgccactgcactccagcctgggcaacagagtgagactctgtctcaatcaatcaatcaatcaatcaatcaataaagtttccacgctgggaggaactacagctcaatgccttcacaatgcgacctacgtgctggcgtgacggctcattgtatctgcgccactgcgacactttctatgcgtgcaataatgtaccctctcccctctccattgccccagaaaaccctcctgtcactttccctcttggggacactgctttggaaaaaaagcaaagcccactcctgattctttgcttacttgggacaagtaataaaacccctattgatcaaaacctgcgttcttttggagagttgtttgttactaggcaaatgaaccccctttttcttgggtaacattttcatttttcttggggtatctagaagtaaaatggctggatctgacagtagatatatgtttgactttttaagaaactgcaagccgggcacagtgacccatgcttataatcccagcacttagggaggctgaggcgggaggatcgcttgagcctaggagttcgaggccggcctgggcaacatggagaaaccctgtctctagaaaaaaaaaaaaatagctgggcatggtggcatgcacctgtagtcccagctacttggaaggctgaggtggggggatccctcgagccccagagatcaaggctgcagtgagccatgactgtacccctgcactccaacctgggcgacagagcaagaccctgtctcaaaaaaaaaaaaaaaaaaaggctggagtgcagtggtgcaatcacagctcactgcagcctccacctcctgggttcaagcgattctcatacctcagcctcccgagtagctgggattacaggcgctcactaccatgcctggctaatttttgtatttttagtagagatagggtttcgccatgttgatcaggctggtctggaactcctgacctcaagtgatctgcctgcctcagcctcccaaagtgctgggattacagtcatgagccactgcacctggctgcaaaaaaaggggaaatttagtttcattttgggttaattttcgtatatgaggtaagggtctgatatggtttaactctgtgttcccacccaaatctcatcttgaattgtactcccataattcccacgtgttgtgggagggagctggtgggagataattgaatcatgggggcggttccccccatactgttcttgcggtagttgtggtagtgaataagtttcacgagatctgatgttttttgtttgtttgtttgttttgctttgtttttttttttgagacagagtcttgctcttttgcccaggctggaatgcagtgacatgatctcagctcactgcaacttccacctctcgggttcaagcaattctcctgcctcagcctcccaagtagctgggactacaggtgcctgccaccaagcccgtctaattttttgtattttagtagagagtagagggtttcactgtgttgcccaggctggtctcgaactcctgagctcaggcaatctgcctgcctcagcctcccaaagtgctaggattacaggcatgagccaccgtgtctggccgagatctgatggttttatcaggggtttccacttttgcatcttcctcattttctcttgccactgccatgtaagaagtgcttttcacctcctgccatgattctgaggcctccccagccgtgtagaactgcaagtccaattaaacctctttttctctgtctcgggtatgtctttattagcagtgtgaaaacagactaatacagtaaattggtactgggagtggggcattgctgaaaagatacctgaaaatgtggaagtgactttggaactgggtaacaggcagaggttggaacagtttggaaggctcagaaaaagacacgaaaatgtgggaaagtttggaacttcctagagacttgttgaatagctttgcccaaaatgctgatagtgatatggacaataaggtccaggctgaggtggtctcagatggagatgaggaacatgttgggaactggagcaaaggtgactgttgttatgttttaacaaagagactggcagcattttgcccctgacctagagatatgtggaatgttgaactttgagagagatgatttagggtatctggtggaagaagtttctaagcagcaaagcattcaagaggtgacttatgtgctgttaaaagcattcagttttaaaagggaaacagagcataaaagtttgaaaaatttgcagcctgacaatgtgatagaaaaaaaattgcattttctaaggagaaattcaagccaactgcagaaatttgcataagtaatgaggaatcgaatgttaatccccaagacaatggggaaaatgtctccagggcatgtcaggggtcctcacagcagcccctcccatcacagggctggaggcctaggaggaaaaagtggttttgtgggctgggcccagggtccccaagctatgtacagtctagggacttggtgtcctgtgtcccagccgctccagccatggctgaaaaaggcgaatgcagagctcaggccatggcttcagatggtgcaagccccaagccttggcagctcccacatggcattgagcctgtgggtgcacagaagtcaagaatcaaggtttgggaacctccacctagatttcagaagatgtatggagatgcctggatgcccaggcagaagtttgctgtaagggtggggctctcatggaaaacctctcctagggcagtgcagaagggaaatatggggtcagagcccctacatagagtctctactggggtactgcctagtggagctgtgagaagagggccaccatcctccagacaccagaatggtagatccaccgacagcttgcacaatatgcctggaaaagccacagacactcaacaccagcccgtgaaagcagctgggaggaacgccgtaccctgcaaagtcacagggacggagctgcccaagatcatgggaacccacctcttgcatcagcatgacctggatgtgagacatgaagtcaaaggagataatgttggagctttaggatttgaatgccccgccggatttcagacttgcatggggtctgtagccctttgttttggccaatttctcccattttgaatggctgtatttacccaatgtctgtacttccatttccatctaggaaataactaacttgcttttgattttacaggcttataggcagaaagaacttgcttgtctcagatgagactttggactgtggacttttgagttaatgctgaattgagttaagacattgggggactgttgggaagacatgattggttttgaaatgtgaggatatgagatttggcaggagccaggggcagaatgatgtagtttggccctgtgtcccctcccaaatctcatcttgaattgtactcccataattctcatgtgttgtgggagggacctagtgggagataatcgaatcgtgggggcggtttcccccatactgttctcgtggtagtgagtaagtctcacgagatctgatagttttatcaagggtttctgcttttgtgtttccctcattttctctggccactgccatgtaagaagtgccttttgcctcctgccatgattctgaggcctccccagccatgtggacctgcaagtccaattaaacctctttttctcagtctcaggtatgtctttattagtagcgtgaaaatggactaatacagggtccaacgtcatcattttgctgtggatatccagttttccgcagaatttgttgaaaaacacttgtcctttcccatttaatggtcttggcatccttgtcaaaaatcatctcactgtatattaagggtttatttctgggctctccatgtcttttactgatctatatgtctgtctatgtaattttgacctcaaggttccttgagatgaatttaagaatggatttttctctttctgaaaaaaaattgagattttgataggattgctttgaatcaacggatcactttgggtactatagccatcttaacaatattaagtcttctaattcatgaacatgggatgtctttctggtatttttgtctttaatttatttcagcgatgatttgcagttttcagtgtacaagtcttttggccccttggctaagtttttcttaagttttttattcttttggacactaccataagtggaatttttttcttacagtgagctgtgatcttgcagtgagcctcagttgtgccacttcggtttttttttcttttctaaagcaaataacaagacacagtttaccatttttactttttaaaacctaaccttggctgggtgcagtggctcatgcctgtaattctagcactctgggaggccgaggtaggtggatcacttgaggccaagaattcaagaccagcctggccgacatggtgaagctccatctctactaaacatataaaaattagctgggtacctataatctcagctacttgggaggctgaggtgggaggatcacttgaacccgggaggtggagactacagtgagccgagatcgtaccattgcactccagcctggatgatagaatgagactccatctcaaaaaaaaaaaaacatacaaaaaaaaccccacccagccttaacactacatatttttatttttacttttttaagacaaattctcactctgtctctcaggctagagtgcagtggcccgaactcactgcagccatgaacccctgggtttaagttatcctcccacctcagccttccaagtaactgggactacaagcatgcaccatcacacctggttaatttttaaaattttttgtagagatggggccccactatgttgcccaggctggtctcgaactcttgggctcaagtgatcttcctgtgtcatcctcccaaagtgctgggattataggcgagagccaccacacccgacctcatatgcctttttcacatcctggggtgaggcatgtctctgcatgcctggaacttagtggtaagcctccatgttgtaacagatggtgggaccaggtccaagaatgcaggcagccagtggtgggaagcaggggaggctgaaggcgacccgggtatcctctgggcttctgcagggttgtgctggtggtgatagtggtggaggttctttgtgctttcgtttttctcctttctccaacaacaaactggaattggtttcttttttcattgttgttgttgttgttgtagagacagggtctctgtcacagaggctgggatgcagtggtatgatcacagctcactgcagcttcaacctccagggctcaagtaatcctccagcctcagcgtcctgagtagctgtgactacagaaagcaccagcatgcctggctaatcttaaaattttttgtggagatggggtcttgctatgttgcccaggctggtcttgaactcctgggctcaagtgatcctcccatctcagactcccaaagtgttgggattacagatgtgaaccactgtgcctggcctgtttgcctaatttccttttcagattgttcgttgttagtggtgtagaaatacaattgattttttttttttttttgagatggagtctcgctctgtggcccaggctagagtgcagtggtgtgatctcggctcactgcaacttccgcctcctggtttcaagcgattctcctgcctcagcctcccgagtagctgggactacaggcgcgtgccaccattcccagctaatttttgtatttttagtagagacagggtttccccatgttggccaggatggtcttgaactcttgacctcatgatccacctgtctcagccttccaaagtgctgggattacaggcgtgagccaccgtgcccagccaataaaatcgatttttgggggttgattttgtattctgcaaatttgctcaatttgcttattttaacaggcttctgtggacatgtgtgtaacttctgggatactctatgtataagatcatgtcatctgcaaacagagatcattttattccttcttttccagtttggatgcagaaattttcaatttctgtttcatgcctagtcacattggctaaaacttcatagagagagagagagggatacggaatcttggtctgtcacccaggttggagtgccgtggtgtgatcttggctcactacaacctccacctcccacgttcaagcaatcctcctgcctcagcctccccagtagctgggattacaggcatgtgccaccacgcctggctaatttttgtattttcagtagagatggggtttcaccatgttggccaggctggtctcgaactcctgacctcaagtgattcgctcatcttggcctcccaaagtactgggattacagacatgagccaccacacccggcctgtaggatgtttagcaacatctctggcctcatccctctaggtgccagtagcaccaccatccactccagttgtgacaatcaaaattgtttccagacatggcgattgttccctaaggcctggggcagagtaggagagtggaatcatccttgcttgaggatcactattctgcactaaaaaagaatcaaaaaggatatgtagggttctcttttccataatatgtatttattattttttaattttttcgatacggagtcttgctctgttgcccaggctggagtgcagtggcacaatcttggctcactgcaacctccgccctctgggttcaagcaattctcctgccttaccgtcccaagtagctgggattacaggtgcatgccaccacgcccagctaatttttgtagtagagatgggttttcgacatgttggccaggctggtctcgaactcctgacctcgtgatccgcctgcctcggcctcccgaagtgctgggattacaggcatgagtgaccatgctcagcctatatttaaatttttatttcccccgagatggagtttcgctcttactgccccagctgaagtgcaatgatgcaatctcggctcactgcaacctccgcctcctgggttcaaagtgattctcctgcctcagcctcccgagtagccgagattacaggtgcccgccaccacacccggctaattttttgtatttttagtagagatggggtttcatcatgttgcccaggctggtctcaaattgctgacctcaggtgatccaccctccttgacctcccaaagtgctgggattgtaggcgtgagccatcgcgactggactatttttaatatttaaagtgattcatttttatagccagaaaagaacattttgaaattattggccaggtacactggctcatgcttgtaatacaaaaatacaaaaattagccagctgtggtggcttgtgcccatagtcccagctacttgggaggaccacttgagcccaggaggcggaggttgtagtgagccaagatcatgctactacactccagcctgggcagcagagcgagcacttttctcaaaaagaaagaaaaaaagaaattatttacatttattgagcacacaatatgtgccaagcagtttacccatatattaaaagtattgatatttgccgggctcagtagctcacacatgtaatcccagcacattgggaggccaaagcgggtagattacctgaggtcaggagttcgagaccagcctgaccaacatggagaaaccccgtctctactaaaaaaaaaaaaaaaaaaaaaaaaaaaatacaaaattagccgggtgtggtggcacatgcctgtagtcccagctactcgggaggctgaggcaggacaatcacttgaacccaggaggtggaggttgcggtgggccaagatcgtgccattgcactccagcctgggcaacaagagtgaaactccgtcaaagtctgttttgttttgttttgtttgagatggagtctcgctctgtcacccaggctggagtgcagtggtgcaatctcggctcactgcaagctccatctcccagattcatgccattctcctgactcagcctcccgagtagctgggactacaggcgcctgccactatgcccaactaattttttgtatttttagtagagatagagttttgccgtgttagccaggatggtctcgatctcctgacctcgtgatccaccccccttggcctcccaaagtgctgggattacaggcgtgagccaccatgcccagcaaaaaataaaataaataaagtattgatgtttattgctggatttggtggctcatgcctataatcccagggctttcaaaggctgaggcaggaggatcacttgaggccaggaatttgaaaccagcttgaaaaatatagtgagaccttcatctctaaaaataaaaaaattaatcaggcagggtggtgtgtacctatagttctagctactcaggaggcagagtcagaaggattgcttgagcccaggagttctaggctgcaaggagctatgaccatgccactgcactctagcctaggtaacagtgaaacttgtctcttaaaaaaatatgtgttggccgggcatggtggctcacgcctgtaatcccagcactttgggaggccaaggcaggtgggtcacctgaggtcaggagttccagaccagcctggccaacatggcgaaaccctgtctctactaaaaaagtacaaaaattagccgggcatggtggcgagcacctataatcccagctactcaggaggctgaggcaagagaagcttgaacccaggaggtggaggttgcagtgagccaagatggcaccattgcactccaacctgggcgacaagagtgagactctgtctcaaaaaaaaaaaaaatgtgttgatgtttattgagcagagactcagtaggatacactttttcttttctcttttttctttttgagacagagtctcaccctgtcgcctaggctggagtgcaatggtgcaatctcagctcactgcaaccttggcctcccaggttcaaatgattctcctgcctcatcctcctgagtagctgggattacaggtgcacaccaccatgcccagctaattttttttttttttttgagatggagtttcattcttgttgtccaggctggagtgcaatggcacaatctcagctcattgcaacctccacttccctggtttaagtgattctcctgcctcagcctcccaagtagctaggattacaggtgcactccaccatgcctggctaattttgtatgtttttttagtagagacagggtttctccatgttggtcagactggtctcaaactcccgacctcaggtgatctgctcacctcggcctcccaaagtgctgggattacaggcgtgagccaccacaccctgcactatttttttttttaatctttagtagagattgggtttcaccatgttggccaggctggtctcaaactcctgaccttgtgatcctcctgcctcaggctcccaaagtgctgggattatagacatgagccaccacgcccagccaagactcagtaggatacactttttttgaagtaattattttattgatgtttaaaaaattaataggctttattttttagagcaattttaggtttatagtaaaattaagcagaaatttcagagagctctcatatacgtcttctattctccttcacccccacaatttcccctattattaatatctttcattagagtggtatatttgttacaatagatgaacaaatattaatacattattattattattattatttgagacagagttttgctctgtcacccaggctggagtgcagtggcatgatctcagctcactgcaacctctgcctcctgagttcaggcaattctcctgccttagcctcccaagtagctaggattacaggtgtgtgccaccacgccctgctaattttttgtgtgtttagtagagacggggtttcaccatgttggtcagtctggtctcaaactcctgatctcaggtgatccacctgcctcggcctcccaaagtgctgggattacaggtgtgagccaccgcacccagcctaatacattattattactgaagtctaccttttacattagggttcactcttgggttgtgtattctattggttttgacaaatgcacaatgatgtgtatccaacatcacaacctatcatactgaatattttcactgccctaaaaatcccctgtatttggctgggtgcagtggctcatgcctgaaatcccagcactttgggaggctgaggcgggtgaatcaagaggtcaggagttcaagaccagcctgaccaataaggtgaaaccctgtctctactaaaaatacaaaagttagctgggagtggtggcgctcatctgtagtcccagctacttgggaggctgaggcagaaggatcgctggaacccaggaggtggaagttgcagtgagctgagaccatgctattgcattccagcctgggtgacagagcgagactctgtctcaataaataaataaatagtcccccatggttaatctatattggtcttgcttttagcgtcctcctcagttctattcattttgttaatttattcttttttattttctgtaaatggtcatatcatctggtttcaattctttttcttatcttattgcattgtccagcacctccacataagcacgaaatattagccatgatttgaggcattcctgcctcattcttaaatatgttgtacatcctgttttaccatcttttttgttttgtgtgtgtgtggaggtggggacagagtcttgctatgtcacccaggctagagtgcaatggcacaatctgagctcactgcaacctctgcctcccaggttcaagtgattctcctgcctcagcctcctgagtagctgggattacaggcacatgccaccacgcctgactaatttttgtgtttttagtagaggcagggtttcaccatgttggccaggctggtctcgaactcctgacctcaggtgatctgcctgcctctgcctcccaaagggctgggattacatgtatgaaccactgcacccggctctgttttaccatctaacaggatgcaggtgattcctttctaatcaccatcaatggtgatcagaacttttaagaaaaattctaagaacttaaaaaaaaaaaaggaaagtggtttctgaatgttatctaaagtttttccatggtgaaataatcacgtggaatttttctccttttatcttttcattgaataaatgaagctttctaaagctgaactttccttgtctctttggaataagaccccgcatactcctagtatagtgtcttttaaagcacagctgaactcaatttgctaatgttttattcagcatttttgcatgcaccaagagccctgacctcttcctggcagctcagtaccctgcagctgagccgattcccataggaatcctggaacttctgcataaggtcaactgggtgacttcaaccaagcagctccagaggcctcctcccagaatctcctcttcctctgggcaaccctgctgcctaccccagcaccccaggcagtgcccttgcctcctgttcctcctcgtcctctgagccctgtcttgcagccctgttgaatgttctcctaaatggctgggaggtggggcccctccccttcaggtccacaggcttgtctctgtctcccctgctgatcttggtatctgtagcttaagccaatactgaggccctgaattcctattctttctggtacagcgggagagttgtcaagaagccaggtggagcagaagacaagaccaggcaggaagcaggtaagtttccactggaatgactccacttgcctcctaccgaggcccagggctgtgtcagcttcaggtgcagctggctccaggcccacctggggcacagcacggcaaggatggaaggtctcccctacatcctattctccccagagccaggtctgagacgggctgggattgaggatcatcccaaaactggtggctctcaggaggtagctcacctcatgccacctaccccaccaagatggaatctttttttttttttttttttgagacagactcttgctctgtcacccaggctggagtgcagtagcatattcttggctcactgcaacctccgtctcccgggttcaagcgattctcctgcctcagcctcccgagtagctgggattacaggcacccgccaccacacccagctaattttcatatttttagtagagacaaggtttcgccatgttggccagtctggtcttgaactcctgacctcaagtgatctgcccacctaggccttccaaaatgctgggattataggcgtgagccaccactcctggcctaaggatggaatcttgatgaaattgctgtgtggcctgcagccagtcgctgcccctctctgggtcatccacgttgctttctccaagtcctgacctggcaatggattgttcaaggagctggtcaaatccacagttgccccagcaatgcagagccctcaaacatgaaaaaaaaaaatctagacagaaagatttttttttttcttagaaaaatgagccaggtgcagtgcctcacgcctgtaatcccaccactttgggaggtggggcgatcatctgagcccaggagtttgagaccagcctgggcaacatggtgaaactgcatctctacaaaaaatacaaatattagcctggtatggtgatgcatgcctgtggtcccagctacacaggaggctgaggtgggaggatcgcccgagcctgggaagttgaggctgcagtgagttgtgatcatgctactgcacttcagcctgggtgatgggagtgagaccctgcctcaaaaatctaaaaaaagaaaaaaaaagaatattagattacaaaattcacattactgtggaaattgcttttgcccttccaaaacaaatcataaaacatgtttcctggtgaatacatacaaatcttactaaatcttcttttgaatacatataaatcttattaaatcttcttttaatttatttttttaaatttggcttttcttttttctttttaatcacaaaataatttcaagagccaatttgtcctggaggccttgttatgaaaatctgcagacccctgcggctctcatgtttgacgaaatcaagaaaaacattaacacaatcgttgcagaagggtgaccaatgcggttgctttgcggctgagtattggttttatttcaaaacacaatgtaagaggaacaaacaaaacacacatcccactcaacaccacacttctgacaccagatgtgtgggttgtctttattttttccacatagtaagcaattctccagtggacaccagctgggattcctctgatgcaatttggttccgatgctatctactcggacacagcatcagatcccgcaggttaagggctcaatcccacaaaacagcccgccttgagacacaatggtctctatagagtgggataccccacccttgcaacctgcagatgtgttcatcaactcggaagctcttcaaaccccatcttttggggatttttatgggggcttcattatgaaggcatgattgattattaactcagtccctagcccctctccggtctccagagaaagagggtggggctgaaagctccaagcttctaatgatggcttggtcttgttggtccccacccaggaacccaccaagagtcatctttttagaaccaaagacgctcctatcacccaggaaactctaggggatttaggagctctatgtcagacactcccatcactctgtcaggaactggggtcaaaagaccaaatatttatttatttatttatttattattattttgagacggagtctcgttctgttgtcaggctggagcgcagtggtgcgatctcagctcactgcagcctccgcctcctgggttcaagcgattctcctgcctcagcctaccgagtagctgggactacaggtgtgcgccacaggcctggctaatgtttgtatttttagtagagatgaggttttgttatgttggccaccctggtctcaaactcctggcctcaagtgatctgcccacttccacctcccaaagtgctgggattacaggcatgagccaccctgcccagactatttatttttatttttaaacttttctttagaaaaagaatcttgctgtgttgcccagggtggagtgcagtggggagatgttgattcactgcagcctcaaactctcaggctcaatcaatcctcccacctcagcctcccgagtagctgggactataggcacacaccaccatgcccagctaattttttatcttttgtagagacagcaactcactaagttgcccaggctggtcttgaactcctgggctgaagcaatcctcctgcttcagcctcccaaagtgctgggattataggcatgagccaccacacccagccccatgccctgtttttcactggtgcatattttctaccagaaatgagagttttaggtatgaatgaagactagtctgtgtgaaaacctgtaattgtgcttttgaaaaaagatctccaggtcttcacaaaactttttattccctgaggatgccccactgcaaacgcctgtgaagctggagtgccagacactgaggcctgaggctgggggacacagaggctaccagcttgcttggacctcctcaatctgtcaaagaaactggcttggggaccactggaggacccaaatctccctcttctctgggcagtgggtcttgtgcatgctggccttggacctactgaaggcccttccagccccagtgctattctctgaattcatggggagcagaggtgttgggactgagtcctgttggagactccagaaacactgacgtttcttgtttggtcctggggttaggtaacgacggctgtttctttttttctttctttctttcttttttttttttttttttttgaggtggagtcttgctctgtcacacgggctagaatacagtggtgtgatcttggctcactgcaacctccaccccctgggttcaagcgattctcctgcctcagcctctcgagtaactgggattacaggcatgcaccactacccccagctaattttgtatttttagtagagatgggatttctccatgttggtcaggttaatctcaaactcctgagctcaggtgatccacccacctcggcctcccaaagtgctgggattacaggtgtgagccaccacacctggccagcaatttatttttagtcagttgtggactatcctgggtggctcctgcctagattattctaagaatttcttttttcttttttttttattttaagacaaggtcttactctgtcgcccaggctggagtgcagtgatgtgatcttggctcattgcaacctccacctccccagttcaagcaattctcctgcctcagcctcccaagtagctgggattacaggcacctgccaccgtacccagctaagttttgtatttttagtagggacggcatttcaccatggtggccaggctggtcttgaactgctcatctcaggtgatccacccacctcggcctcccaaagtgctgggattacatgcttgaaccaccggcgcctggcctattctaagaatttcaccatttggacagctattagccagctttggttggtcatgtgggtccccactgcattcaactcagtcctagcctgatcttcagtttccaacaatatcataatatcattgagatagtgtattattacacttaagatctgcaccaagtccaaatcccacttctgacaccaaaagtaaaaagaaaacataaattaatttttttttctgctcacacatcactcaacacaacattcctttcttttcttttttcttttttgagacggagtctcattctgtcacccaggctgtagtgcaatggcgtgatctctgctcactgcaaccttctgcctcccgggttcaaacgattcgcctacctcggcctcccgtgtagctgggactacaggtatgcaccaccatgcccagctaacttttgtatttttagtagagatggagtttcaccatgttgcccaggctggtctcgaactcctgacctcaggtgatctgccagcctcagactcccaaagtgctgggattacaggcatgagccactgtgcccagccttaacacaacatttctgacaccagatgtatgggaacttttccaaacgtcaagtaattctccagcagacaccagctgggtggggttttttgtttgatttttttgtctttttatttttttaggtgggtgtttttaaattcaattcagttcagaagctatctacctgaagatagtatcagatcccataggttaagggctcagtcccacaagatggtccctactgcagatgccatctgcaaacagtaggttttcacctgtacttctaatgcactggctgtaaatcaagactcccttaggctgggcacagagtcccctcctgtaatcccagcactttgggaggccaaggtgggaagatcacttgagctcaggagtttgagaccagcctgggcaacatggtgaaaccccatctttacaaaaaatacaaaaaattagctgggcatagtggtgtgcacctgtggtcccagttacttaggaggctgaaatgggagaatcgcttgagcccaggaggtggaggttgccgtgagccaagatcgcatcattgcactccaggctgggcaacagagcaagaccccatcttaaaaaaaaatggtggctggccgcagtggctcatggttgtaatcccagcactttgggaggccaaggtgggcagatcacctgaggtcaggagttcaagacccgtctctactaaaaatacaaaaattagctgggtgtggtggcatgtgcctgtaatcccagctactcaggaggctgagacagaagaatcacttgaacccaggaggcggaggttgcagtgagccgagattgcaccattgcactccagcctgggcaacaagagtgaaaatgtcatctcaaaaacatttttttaagtactatttttttaaagaagtgggggtggccaggtgcagtggttcacacctgtaatcccagcactttgggaggccaaggtgggagaatcagtcaagctcaggaattcaagaccagatagcacaacatggtgaaaccctatctctacaaaaaaatacaaaaaaatagccagctgttggaggcacacacctgaggtccctgctacataggaggctgaggtgggaggattgcttgagcctgggagatggacactgcagtgagccaagatcaccccagcactccagcctcggtgatagaacaagaccctgctaaaaaaaaaaaaaaaaaaaaaaaaaggtggctaggcacagtggctcatgcctgtaatctcagcactttgggaggctgaggcaggtgatcacctgaggtcaggagtttgagaccagcctggccaacatagtgaaaccccgtctctactaaaaaaaaacttagccgggcatggtggcacacatctgtaatcccagctacctgggaggctgaggcaggagaattgcttgaacccaagaggtggaggttgcagtgagccaagattgcgccattgcactccgccctgggcaaaaagagtgaaactccatctcaaaaaaagaaaaagaaaacaataatactcacacctgtaatcccagcactttgggagcctgaagcgggcggatcacctgaagtcaggagttcaagaccagcctgaccaacatggagaaatctcgtctctaccaaaaatacacaattagccgggtgtggtggcacatgcctgtaatcccagctactcaggaggctgaggcaggagagtcgcttgaacctgggaggtggaggttgcagtgagccaagattgcaccactgtattccagcctgggcaacaagagcgaaactccatctcaaaataataataataataaaaaaagattcaggtgaacagccagatgaggagatacctagagcagggtctggagggagacaggagcttctgcctccatggagtggggtccaccacccttctggtatgtggaagtgtttaccaatgtggaagctcttcaaactccgtagttgagggatttttatggaagctttattatgaagccatgatcgattattaactccatttccagcccctcttccctctccagagaaagggggtgaggctgaaagctccaggcttgtaatcatggcttggtcttcttggtccccaacccaggaacctcccaagcgtcacctcattagaacaaaagacactcctgtcacccaggaaatcccaaggaaatttggaactctgcgtcagatgttcccatcagactacatcagattacaaagttctcaggagctctgtgtcaggaactgggacaaagaccaaatatttatcttaccataaatcacaataccagccaggcacagtgactcacacctgtaatctcagcactttgggaggctgaggtgggtggatcacctgaggtcaggagtttgagaccagtctggccaacatgcagaaaccccgtctctactaaaaatacagaaattacctgggcttggtagtgcacacctgtaatcctagctactcccgaggctgaggcatgagaatcgcttgaacctgggaatgggagcttgcagtgagccgagatcccaccactgcactccagcctgggcaacaggctgcctaaaaacaaaacaaaacaaaaaagtgtgcccttggctggaggtgtggccagagtaaagaccccagcctcagttgctggtggggaaggtcatgtttgatatagggaaagaggcaccagattggcagctatcagaacaaagggaaaacacacccaaggtgaacaaaggctgcagggagcccacagattgcagtttactggggagaaatgtcaagttcagaaagcaaacagaggctttgtgtctctgaggggcttggttgcacgttaacgcccggttcctgccccagcccaccctggcccagccatcctgcacggaagcacaggctgtttgctgaattcaatccttgcctaaacatttgtttatttgagacaagatgcctgcgggggcctcatggccaggtcagagctcacagctggggcagaggaggagaggctgcagaaggctggacctgtaggtttgtctccaactctgagactccaggcggggagtcctggggtcagagcatggacagggctcatagtgttgggtcacagactcaagactctccaggtttcctcataaaaaggaaggaaacagccgtgcgcagtggctcacgcctgtaatcccagcactttgggaggcagaggcaggcagatcacttgacgtcaggagtttgagaccagtctggccaacaaggcaaaaccccatctctacaaaaaaaaaaaaaaaaaaaaaaacacaaaaattagccaggtgtggtggcacgcacctgtaatcccagctactcaggaggctgaggcacaagaatcacttgaacctggaaggtggaggttaaagtgagctgagatcccaccactgcactccagcctgggcaacagagtaagactgtctcaaaaaaaaaaaaaagagagagagagaaaatctaatgcctgatgatctgttactgtctcccatcactcccagatgggactatctagttgcagaaaataaagctcagggctcccactgattctacattatggtcagttgtattattacaatgtaataataacagaaataggccaggtgcagtggctcatgcctgtaatcccagcactttgggaggccaaggcaggtggatcacgaggtcagaagttcgagactagcctggccaatatggtgaaaccccgtctccactaaaaatacaaaaatggctccctctccctctccccaccatctccctctccctctctccacggtctccctctgatgccgagctgaagctggacggtactgctgcctgattctcctgcctcagcctgccgactgcctgcgattgcaggcgcgcgccgccacgcctgactggttttcgtattttttttggtggagacggggtttcgctgtgttggctgggctggtctccagctcctaaccgcgagtgatctgccagcctcggcatcctgaagtgccgggattgcagacagagtctcgttcactccgtgctcaatggtgcccaggctggagtgcagtggcgtgatctcggctcgctacaaccttcacctcccagcagcctgccttggcctcccaaagtgccgagattgcagcctctgcccggccgccaccccgtctgggaagtgaggagcgtctctgcccggccgcccatcgtctgggatgtgagaagcccctctgcctggctacccagtctggaaagtgaggagcgtctctgcccagccgccatcccatctaggaagtgaggagcgcctcttcccggccgccatcccatatgggaagtgaggagcgtctctgcccggccccccatcgtctgagatgtggggagcacctctgccctgccgccccgtccgggatgtgaggagcgtctctgcccggccgccccatctgagaagtggggagaccctctgcctggcaaccgccccgtctgagaagtgaggagcccctccgcccggcaaccgccccgtctgagaagtgagaagcccctccgcccagcagccaccccgtctgggaagtgaggagcatctccgcccggcagccacctcgtccggcagggaggtgggggggtcagccccccgcccggccagccgccccgtccgggagggaggtggggggggtcagccccccacctggccagccgccccgtccgggaggtgaggggcgcctctgcccggccgcccctactgggaagtgaggagcccctctgcccagccagccgccccgtccaggagggaggtggggggtcagccccccgcccggccagccgctccgtccgggagggaggtgggggggtcagccccccacccggctagccgccccgtctgggaagtgaggggcgcctctgcccggccgcccctactgggaagtgaggagcccctctgcccggccagccgccccgtccgggagggaggtgggggggtcagccccccgcccggccagctgccccatctgggagggagatggggggtcagcccccgtcccggccagccgccccgttcgggaggtgaggggcgcctctgcccggccgcccctactgggaagtgaggagcccctctgcccggccaccaccccgtctgggaggtgtacccaacagctcattgagaacgggccatgatgacaatggcggttttgtggaatagaaaaggggggaaaggtggggaaaagattgagaaatcggatggttgccgtgtctgtgtagaaagaggtagacatgggagacttttcattttgttctgtactaagaaaaattcttctgccttgggatcctgttgatctgtgaccttacccccaaccctgtgctatctgaaacacgtgctgtatccactcagggttgaatggattaagggcggtgcaagatgtgctttgttaaacagatgcttgaaggcagcatgctcgttaagagtcatcaccactccctaatctcaagtacccaggaacgcaaacactgcggaaggccacagggtcctctgcctaggaaaaccagagacctttgttcacttgtttatctgctgaccttccctccactattgtcctgtgactctgccaaatccccttctgtgagaaacacccaagaatgatcaattaaaaaataaaaaaaaataaaaaataaaatacaaaaatgagctgggcagggtggcgggcgcctataatcctggctacttgggaggctgaggcaggagaatcgcttgaacctgggaggcagaggttgcagtgaaccaagatcgcaaatttccctccagcctggtcaacaagagcgaaactctgtctcgaaaaaacatatatataataatactaaagtgcacagtaaatgtaatctgcttgaaacattctgaaaccattcccctccctgcctcctgagtagctgggactacaggcacatgcagcacacccagctcatttaaaaaaaaaatgatttttttttttttttggtagagatggggctttactatgttgtccatgctagtcttgaactcctagcctcaagggatcctcctgccttggcctcagaaagcactggattccaggccataagccaccactgttttttttttttttttttttgagacggagtctcactctgtcacccaggctggagtgcagtggtgcgatctcagctcactgcaaactctgcttcctgggttgaagcaattctcctgcctcagcctcctgagtagctggaataacaggcatgcaccactaattttttgtatttttagcagaaacggggtttcatcatgttggtcaggctggcctcaaactcctgacctcaagtgatctgcctgccctggcctcccaaagtgctgggattacaagtgtgagccaccaccgccagcccttttgcttatttatctagcattaagaaatccagaacgaggtagcttcacaagtttcttcttggttgttttgttgttgttgtttttgttgttgtttagagagagtctcgctctgttgcctaggctggagtgcagtgacgtgatctcggctcactgcaacctctgcctcctgggctcaagcaattctcctgcctcagcctcccgagtagctgggactacaggtgtgtgccaccatgcccgggtaatttttgtatttttagtggagatggggtttcaccatgttgtccaggctggtcttgaactcctgacctcaggtgatccagccaccttggccacccaaagtgctgggattataggtgtgagccaccacacctggtccacatgtttcttctttacctgctccatgatgccacagattttcttttaggttctgccatctctagtgtgttccctttttcctcatgcttgttgcctcttgttgcagaatggctgctgcagctccagacatcacattcaaggcagaaacaagagggtaagggggaaagccagctgcatttccctttgatcagataaaggcataaaaatatttcctagaaattcccatggcatccttcctcttagggctcattggtcagaactgggtcctgggccacctctacctgcagaggcagctgggaaactggagaatagaaagccattgtcttttaaatctaatttcagaagtgatggctccttgcttctattgcataatattgattaaaaggcagtcagtaaaggctgggcgtggtggctcacacctgtaatcccagcactttgggaagccaaggcaggcagatcccttgaagccaggagttcaagaccagcctggccaacatggtgaaaccccatctccactaaaaatacaaaaattagccaggtgtggtggtgggcacctgtaatcccagctactcactcgggaggctgaggcaggagaattgtttgaacccaggaggcagaggttatagtgagccaagatcaccactgcactccagcctgggtgacagagtgagaccctgtctcaaaaaaaaaaaaaaaaaaggcaatcagctcgcattcgaagagagggaattcgagaaaagtcagaatgccaggaggtggggatcactgcaaaccatcttaaaggcttcccccatggccaaatgcactggctcatgcctgtaatcctagtgctttgggagtctgaggcaggaggatcgcttgagttcaggagttcaagaccagcctgggcaacgcagagtgaccccatccctacctcaaaaaaaaaagaaaaaaaagaaacatttagctgggcattgtggcccatgcctttggtcccagctactcgggaggctaaggcaggaggactgcctgagctcaggagtttgaggctacggtgagctgtgacagtgccaatgcactccagcctgggcaacaaagcaagactctgtctcaataaacaaataaatgagtgagccacacagtaatcccttaagggaaggggttttcttttttttcttttctttttttttttttttttttttttttgagacagagtctcactctcttgccaggttggaatgcagaatgtactgtgagacaatacatttctgcagtttttttgtttttctgcttttggttgttgttgttgagacagtgtcttgttctatcacccaggcaggagtgcagtggcacgatctcggctcactgcaacctccgcctcccgggttcaagcaattctcctgcctcagcctcccaagtaactaggactacaggcatgcaccatcacatccggttaatttttgtatttttagtggagacggggttttaccatgttgtccaggatggtctcaatctcctgacttcgtgatctgcccacctcggcctcccaaagtgctgggattacaggtatgagccactgtgcccggccagggaagggattttctaaggtcagttaaacagttcctgcagctgctgaggcgtccctaagaacacattgactattatcacaacaaggataatcccaatatttgtttccagtcttgatgggctgggcttactgatagggttgtaatgatttcagcagaagcagtttgtggacataagattaagatccaattttgaaggatgaaggttgagattaagtatgtgaagaaaatgtacattctaggaggggcctaaagaaggaaatctatgacaggaggttcctgaggctgatgtaacccagctccacaaactaggtggcttaaaacagcagaaaaggccggacatgatggcatacacctgtaatcccagcactttgggaggccgaggcaggaggattgcttgagccaaggagttcaagaccaacctgggccacgtggcgaaaccccgtatctaaaaaaatacaaaaagttagccaggtatgatggtgcacacctgtagtcccggctactagggaagctgaaatgggaggattgcttgagtccaggaggtggaggttgcagtgagctgagatcgtgccactgcactcccgcctgggtgatagaacaagacactgtctcaacaacaacaataacaaaaagcagaaaaacaaaaaactgcagaaatgtattgtctcacagttctagaggccagaagtccgaaatcaaggtgtgggcagtgctggttccttctggagactcctagagagaatccatcccaggcctctctcctggcttcagccatccttggcaattccttggcttgtggcctcatctctccagtcactgccttcttcatcacatggccccatgttccaaattccctcgtctttgttttttggttttttatttatttattatttatttatttatgagatgaagtttcgctcttgttgcctgggctggagtgcaatggcgtgatcttggctcactgcaacctccgcctcccggattccagcaattctgactcagccttccgagtacctgggattacaggctcgcgccgccacgcccaggtaattttttgtatttttagtagagatggggtttcaccgtgttgaccaggttggtctcgaactcctgacctcagggtgcctctgcctctcaaagtgctgggattacaggcacgagccactgtgcccggcctgattttttattttttagacagagtctcactctgtcacccacgctggagtgcagtggcataatcatggctcattgcagcctcaacctcctgggctcaagcaatcctcccacctcagcctcctgagtagctgggaccacaactatgcgccatcacacttggctattttttttttttttttttttttgagatggagtctcactctgtcgcccaggctggagtgcagtagcgtgatctcggcccactgcaacctccacctctcagcttcaagtgattctcgtgcctcagcttcccaagcagctgggattacaggcgaccaccaccatgctgggccaatttttgtatttttagtagagacagggtttcgccaggttggtcaggctggtctgaaacgccagacctcaagtgatccgcccaccccagcctcctaaagtgctgggattacaggcgtgagccacagtgcccagccccacacttggctaattttttaaatttttgtgtagatggggtcttgccatgttgcccaggctggctttatttattttaagcccttcttttttgcccaattcatttaacactttatttattatttttgaaattattctttctatttttattcatttttttaggagacagtgtctcactctgtcactcaggctggagtgcattggcatgatcaatgttcactgcagcctcaaccttctgggctcaagtgatcctcctgcctcagcctcctgaatagctgagactacaggtgcatgcccccatgcctggctaattttttttttgagatggagtctcgctctgtcgctcaggctggagtgcagtggcacaatctcggctcactgcaagctctgcctcccgggttcacgccattctcctgccttagcctccccagtagctgggactacaggcgcccgccaccacgcctggctaattttttgtatttttagtagagacagggtttcaccgtgttagccaggatggtctcgatctcctgacctgttgacccgcccgccttggcttcccaaagtgctgggattacaggcgtgagccaccgcgcccagccctggctaatttttaaaactttttttagatagagacatggtctctctatgttgcccaggctggtcttgaactccagagatcaagtgatcctctggctttagcctctcaaagtgctgggattacaggcatgagccactgtgcctggcttttttgtagaaatggggtcttcttgtgttgcccaggctggtctcaaacttctaggctcaaagcaatcctccctccttggtcttccaaagtgctggaattacaagtgtgaactgccatgcttgaccctagacatttcttcttcttcgtctttgagacagagtctcactctatcacccaggctggagtgcaatggcacgatctcagctcactgcaaacctccgcctcctgggttcaagcgattctcctccctcagcctcccaagtagctgggattacaggcaccaccaccacacccagctaacttttgtatttttagtagagacagggtttcaccatgttgatcaggctggtctcgaactcctgacctcaggtgatttgcctgcctcagcctcccaaagtgctgggattataggtgtgagccaccatgcctggccatgaccctggacattttttttttttttttgagacagagtctcgctctgtcgcccaggctggagtgcaatggcgcaatcccggctcactgcaacctctgcttcccgggttcaagagattctcctgcctcagcctcccgagtagctgggattacaggtgcccgccaccacgtccagctaagttttttgtatttttaatatagatggggtttcaccaggttaccaggctggtctcaaacccctgacctcaggtgatccacccgcctcggcctcccaaagtgctgggattacaggcgtgagccaccatgcccggcctaccctggacatttttataaatggaatcagacactctatgggcttttgtgcctggcttctttcactcagcctcgtgttttcagggttcatccgtgctgtgggatggatcagtgcttcattcctttttatggctgcatagtattccatttcgtggattgaccacagtctgttgatccatgcatcctttaagggaacagctgaattgtttccaccttttggcgatagtgaacaatactgctataaacgtgtgtgtcttttagtcctttttgaatagttaactggagtggatactccttttctcttttttttttttgagatggggtctcactctgtcacccaggctggagtgcagtggtgtgatctcagctcactgcaacttccacctcccaggttcaagcagttctcctgcctcagactcccgagtagctgggactgcaggtatgcaccaccacacctggctgagttttgtatttttagtagagacagagtttcactatattggtcaggctggtctcgaactcttgacctcaggtgatatacctgcttcggcctcccaaagtgccaggattataggcgtgggccaccatgcccagccataaagtggacactcctattctggacatagaatgacaatgatttttctgcacatagaatgacaatgatttttccacacatagaataacagtgattttccttttctttctctctcttttttttaaattggagacagggtctcacttttgtcacctaggctggagtggtgtgactgtatctcactgcagtcactcctttggccaggggatggggaggtttggccatgtctgtggtttggacaatgctcttattttcatctgtggtaagactcaattacggaagggttttgatttttgtctggtttcatcctggacagagtggccctgtttgatgtggtcattctgtgaaatcgtatatgttcaaccaaagaactcctcggcttcactgtgactaccaggtcaactcccagttgaccagagcctggggccaattttttcttctttactttacattcaccttctcgcctttgcatatgctgttcctgctgctcagaatgcctttccctccctgtcttcactcagctctttccttctcaattttcagagtgctcttaaatgccacctcctctgagaagccctctgtgatcacccaggctgtgggcctctataacccatttcagcaccagacacatcttttggtcacagtaaggattttttttttttttttgagcgagggtctcactctgttgctcaagctggagtgcatgcaggcagtgcaatggtggctcactgcagtctccaactcctgggctcaagtaatcctcttgagtagctgggaagacgagcttgccaccacgccagctgattttttttttatttttgtagagacaggggtctctctatcttgtccaggcaggtctcaaaactcctggcctcaagtgatcttcccactttggtctcccaaagtgctaggattacaggcgtgagccactgtggctggcctgtcatctttcaagtttcccaagtgaggagaaaagggatggagaaggccaaaaaaaaaaataagttagaagaacagttcttcctataggtctcaatatgttgccatgttcctattgaaagaaagaaagagaaagagagaaagaaaaggaaggaaggagagagagagagatcagaaagaaaagaaagggaaaggaaggaaagatggaagacaggaaggaaagagaaagaaagaaaagaaagaaaagaaaagaaaagaaaaagggaaaggaaggaagaaaaaagaaagaaaaagaacggagataaagggggctctagacaaacataaaaattggatcttcaaaagataattaattggccaggtgcggtggctcacgcctgtaatcccagcactttgggaggccaaggcgggcggagcacctgaggtcagaagttcgagactagcctggccaacatggcaaaaacccgtctctactaaaaatacaaaaattagtcaggcatggtggctcacacctgtagtcccagcactttgggaggccaaggtgggaggatctcttgagcccagcagttcgagaccagcctgggcaacagagggagaccctatcacaattttttaaaaaacatttcaagtagccaggtatggtggtacacacctgtagtcccagctactcgggaggctgaggcaggaggatcgtttgagcctgggaggtcgaggctgcagtgagctatgactgcactactgcactccagcctgagcaacagagtgagaccctgtctcaaataaataaataaataaataaataacacaacagatgatcgcctcatgagaattttgtctttccgttgtaagtctcctctccagtggaaaagtctcacagtggccactcaaattctaaattgtccccagtgtgaggtaccattggagagagacatgtttggttttggttttgtttttttgagacaggatctggctctgtcacctaggttggagtgccgtattgtgatcatggttcactgcaacctctgcctcccgggctcaagcgattctcctgcctcagcctcccgagtagctgggactacagaagcacaacactgcgcacagcttccttctaagattttgaaatggtgaaaagttgcccaaaggacagtggtccaaggagatctttggaatactttggccatcaacactgactcaagggtgacttactgagtctaggcccgtcctctctttatcgacgtttcccccgatggacccacagtgcaatcccagcactttgggaggtcgaggcaggaggatcacttgagcccaggattcgagatcagcctgggcaacatggcgagaccctgtctctacaaaaagtagaaaaattggctgggtgcggtggctcacacctgtaatcccagcactttgggaggccgagatgggcggatcacaaggttgagagatcaagaccatcctggccaacatggtgaaacgctgtctctactaaaaatacaaaaattagctaggctctgtggtgaggcctgtagtcccagctacttgggaggctgaggcaggaggatcacttgagcccaggattcgagatcagcctgggcaacatggtgagaccctgtctctacaaaaagtagaaaaattggctgggtgcggtggctcacacctgtaatcccagcactttgggaggccgagatgggcggatcacaaggttgagagatcaagaccatcctggccaacatggtgaaacgctgtctctactaaaaatacaaaaattagctgggctttgtggtgaggcctgtagtcccagctacttgggaggctgaggcaggaggatcacttgagcccaggaggtcgaggctgcagtgagccaagattgcaccactccacttttacctgggcaacaaagtgagaccttgattttagacttgaagcctccaggactatgagagaattgatttgcattgtttccttttttttttttgagacagagtcttgctctgtctcccaggctgcggtgcagtggcactatctcggctcactgcaacctctgccccccaggttcaagagattcttctgcctcagcctcctgagtagctgggattacaggcgtacaccaccatgtccggctaatttttgtatttttagtagagacggggtttcaccatgttggtcaggctggtctcgatctcctgatctcaggagatccacctgccttggccttccaaagtgctgggattacaggcatgagccaccacgctcagccaatttctgttgttttcaaaaccactagtttgtggtcatttgctactgtagccaccagaaactcatacagccctgtacaagagacagtccacaggaggaggtgtcgagagagaaaacaatttcaccaaggaacagagtggctgatcagaaaaccaaaaagccgtggagaaactcattcctagaatagtaaacgaaattaaccctacacagaagggccctaatgagatcataactgaagctccagtcagcattaacttaccttccagccacaggcagaatcaccttaagcagatagagacacaagggtctcagatgtgcacactattttttttttttttgagacagagtcttgctctgtcacccaggctggagttcagtggtgcagtctcagctcactgcaatctctgcctcccgggttcaagcgatcctcctgcctcagcctcctgagtagctgggattacaggcacacaccaccatgcccagctactttttgtatttttggtagagacggggtttcaccctgttggccaggctggtcttcaactcctgacctcagatgatctgccttccttggcctccccaagtgctgggattacaggcgtgagccaccgtgcctgacctcagatgggtgcacttttgctgagtccagggtactgattggtggcagggaaggtctcagcccagtctcagtaggacatccagtcctgttgatgtcaaataccaccagaaaaacagctgcagtgaaacccagctgggtttatggattaatgcattgaaggaagacacaccagaaggggttctgtttatctcagaaagagaaagtgagaaggagcgtgttacagaactagggcaactgtggggtgattcgaggagagttcaagggagtgggattctgccctggattgtatgcaaacagctagtgggacaattctctaagtattttaataatctctttttttttttttgagatggagtcttgctctgtcccccaggctggagtacagtggtgtgttctccgctcactgcaagctctgcctcccgggttcacgccattctcctgcctcagcctcctgagcagctgggactacaggcgcccaccaccacacccggctaattttttgtatttttagtagagatggggtttcaccgtgttagccaggatggtctcgatctcctgacctcgtgatctgcctgccttggcctcccaaagtgctgggattacaggcgtgagccaccgcgcccggcctttaataatctttttacctagaaggcgggggaacctgctgggaattggcgaaaactagcagtcacgccctttggccaggagatggggaggtttggccatttttgtggtttggacaatgctcttgtattcacctgtgctaagactcgattacggaagggttttgtttttctgcggccaagtgtgactggtctgagtgtccctgtctgatgtggacattccgtgaaattggtttggtcaatcaaaaaactctacagtttagctgtgactgccaggccaactgctagctgactgtgtgtggtccagggctacttttatcttcctcactttatattcacctcctcacctttgcatatactgttccctctgcccagaacacctttccctctctttttcactcagctctttccttctcaagcttcagagctctccttaaatgccaccacctctgagaagccctctttgatcacccaggctgtgggcctccacaaccctatttcaaccccaggcacatcttttagtcacaattacgattattattttattgttattattattattattacttttgagacagagtcttactctgtcacccaggctgcagtgcagtggcgtgatctcagctcactgcaacctctgcctcccaggttcaagcgattctcctgcctcagcctcccaagtagctgggattacaggcgcatgccaccacgcctgggtaatttttagatggggtttcaccatgttagccaggctggtcttgaactactcaccaagtgatctgcccgcctcagtctcctgaagtgctgggattacagctataagccaccacgcctggcctttattattattatttatttatttattttgagatggagttgcactctgtagcccaggctggagtgcaatggcacgatctcggctcattgcaatctctgcctcctggggtcaagtgattctcctgcctcagcctcccaagtagctgggattacaggcatgtgccaccacgcccagctaatttttgtgtttttagtagaaacagggtttcaccatgttggtcagactggtctcaaactcctgacctcaggtgatctgcctggctcggcctcccaaagtgctaggattacaggcgtgagccaccatgcctggcctttattagtattttttaagagaggttccttcacccaggctggctggagtgcagtggcgctatcatacctcactgcaccctccaacttctgggctcaagtgattctcttgaatgggaggatgagcatgccaccacgcccagctaatgtttttatcttctgtcgagatggggtctcataatgttgcccaggctgctttcaaacacctggcctcaagcgatcctcccaccttagccttccaaagggttgggatcacaggcatgtgccactgcgaccagccaggataataatctttcatgtgattttccgactttaagccccctgcacccagagacctttctgtctcatgcctgaagggaaggaactggccacggaaaaacctgggaaattcctgggggaactccctgaggcaagactgcgcctggcaatttgtaagaagggggctggtgcgacctgagcagagagctaatgggagggtgagggaagccaagggagatggggtgggaggtgggaggagtcttgcgggacaatgggaacccaggggaggcgttagagcaggggaggtgcatcgcgcactgggatttaggtcccagcaaggtcgctggggggatgccttttagggaatggactctgtggtcaactactcctacctgaactgcccccaaagcatttgcttttccctctccacagtcaggaccagtgtaaccttagacccctaatactgccatttttactgttgagaacaccgagaagtagtaaatgcagaaaatctaaagtatagtgcctaagacaaattggcgcctcaaacctaatttctaaataaaattaataaataatattgcagaagtggggagcaggtcagcaatccaggaagaggcactggcaggagcaagagacggaatttgagcctactcgcggttatgagcctactcgcggttacattttggccaaactcaattcctggtctctctgagcctcggtttccctacctggactgcgcggtgtgtgttaatttctctgccccatttatctcccctctcctagccccgccccagcgtcaccagtgggacgcagagactcaggactaggaaagcacttttaaagcgttaagggattgcgaagagctacggagaggcttcctcagggctatactgggtccacctcccctcatggaccgcgggcgcgctctggcggccgggccgctccaggctgaagccgccggaccacgtgtgtagtcgcagctgccatctttcatccgggcatcggccatcttggtaaaggcaatgttctagattttcgcctctgcccgcccctcctggttcatcaacatattaaatgagcgtagggaatgagggcgtattaagtgtcctctttttgaagagacaaagaagtggctgactaccctggcttgggtccgaggcccagccatctttttctttaccaaaatggcggcggtactgaggcgcaatgagtgcgcgccgccaggagctcagcgcgcaggccccatgatgacgtcacggaggcgcgaccgggccggcgctggggtaagaaggtaggagcgtctgcggcgcgggcggaacccgggttcggggagcagaggcgcggggcgggggctgcttggcctgggaccatcccctgggaaggctggaggaggggtgctgggaggcaggagcacttctggcgtccagtctgaaccgcacctagttgggggcgatgcccatttccagactagacgattgaagcccgacgcgacagcatgttcgaggccacctggccccggactgcccctaggcagcttctggtctcgagagggacagagttgggcgcggactcccccggcctcttgtagggggattagtggtgggggacttcaaaagggatagccgggagggctgcttagaggaggcattgttgaattttgtattctgttattttaccttcacatccgtggggtcttaatccccatgggtcttgattcgcttctaagtgtgcccctcgcccagcctgagccactccctgggtaccgcctgggctcccagctcctgccatctggggagtccacctcctcactaaccccagagggcttgtgtgacccatagattgggcttcccggctctaacgccctccacaccttcccatctccctggaatacaaatcgcccccttttccagcctacctcctgcatcccgcgtgcaggctgcgctctcccccactcattcagacttttccttagatgtctcctttaggaagccctttgacccaggctgggtcagaagccctctccgggcttccccggcgccctgcgtgtccttattaggactctgattgcatgtgttggctcttctctgggagtcccatgcaggcagaaagctcatttgtgccacctctttccccagcatcgcacacgtattaggtgcccagtacatatttattgaatgacgtgtgcaagtgagtgagtgtttactacacagagaaaagtgtctgtatttccagcttgggctgtcataactaataccacagactgggtggcttaaacagcagaaattgccaggcactgtggctcacacctgtaatccaggcactttgagaggccgaggcaagcggatcacttgaggtcaagagtttgagaccagcctggccaacatagtgaaaccccgtctctactaaaaatacaaaaatcagataggcatggtggcacatgccaacatggtgaaaccccatctctataaaaatacaaaaattagccgggcgtggtggcaggtgcctgtaatcctagctgcttgggaggctgaaacaggagaattgcttgaaccgggtgggtggaggttgcagtgagccgagattgtgccactgcattccagcctgggtgaaagagcaaaactccgtctcaaaacaaaaaaaagccccaacgtggaaacagcccaaatgtctagctgtggacaatggataaacaaaatgtggcgtatccatgcagtggaggaatattcagccataaaaaggaacgaagggccaggcgcagtggctcaggcctgtaatcccagcactttggaaggccgaggcgggaggatcacttgagcccaggagttcaaggccagcctgggcaacatagtcagaccctgccttaaaaaaaaaaaaaaaaagctaggcatggtggcctgcacctatagtcccagctacttaggaggctcaggtgggaggatcacttgagcccaggaggtcaaggctgcagtaagccgagatttcgccactgcactccagcctgggcgacagagtgagaccctgtctccaaaataaataaataaatgtactctcacactgtgtggccttttgtgtctggcttctttcacttagtattgtgttgttgaggttcaaccacattgtatcatgtatgtattggtgccttgtttccttgtttcctttttttttttttcttttaagagacagggtcttgttctgttgcccaggctggagtgcagtggcacaatcatagctcactgtggcctcagcctcctacgctcaggcgatccttccacctcagcctcctaagtagctggaactacaggcacaagccactgtgcctaattattttttattttgtagagacggactcttgctatgttgcccaggctggtcttgaactcctggcctcaagcaatcctcctgcctcagcctcccaaagcacggggattacaaacgtgagtgatcgcacccggcctgtgattccattgatatggactgaaatgtccagaacagggaaagccacagagacagaaagcagattgatggttaccaggggctaggggaagaggaatagggagtgactgctgatggtgatgtggcctcttttggggggtgcaagtgttctggaactagacagaggtggtatttgcacaacgctgtgaatatacttaaacactgaattgtacacctttttttttttttgagatggagtctcgctctgtcgcctaggctggagtgcagtggtgtgatctcagctcattgcaacctccgcctcccgggttcaagtgattctcctgcctcagcctcccgagtagctgggattataggcatgtgccaccacacccagctttttggttttttttgagagtgagtctcactctgccgcctaggctggagtgcagttgcacgatctcggctcactgcaacctctgcctcccaggttcaagcggctttcctgcctcagcctcctgagtagctgggattaaaggtgtccgccaccacacccagcaatttttatttatttttagttgacacggggtttcaccatgttgactagactggttttgaactcctgacctcaggtgatccgcccaccttggcctcccaaagtgctaggattacaggcgtgagccactgtgcctggccggaattgtccacctttaaattgattctttttcctttcattgagacggagtctcactctgtcgcccaggctggagtgcagtggcacgatcttggctcacttcaacctccacctcccgggttcgagcgattctcctgcctcagcctcctgactggctgggaatacgggtgcacaccaccatgcccagctaatttttgtatttttagtggagatggggttttgccgtgttggccaggctagtctcgaacttctgaccgcaagtgatccgcccgcctcggcctcccaaagtgctgggattacgggtgtgagccaccagacctggcctaaatgagctcatttggtgtcatgatgtgaattttgccttaataaacttttacaaggagagcgctaagtccaaagcccttgttttatacagagaaggccacagaggccccaagagggtcatggctgcccaagtgtgattctgggggtgctgagtgccgatgtcccctccggcccctgctcccccatccccatcctcttcccgcagcctgctgagggatgcccaagaagttccagggtgagaacaccaagtcggcagcggcccgggcacgtagggcagaggccaaggcggccgctgatgccaagaagcagaaggagctggaggatgcctactggaaggacgacgacaaacacgtcatgaggaaggagcagcgcaaggtgcgtgcactccgagtccccgcggcccgcatgccttgtggccaaggccagtggtcattatgtcaatgtgggtgaatagcgagagggccctctgagctttggtctgaaaggccaggagggaccaggcgctgtcgctcacgcctgtcatcccagtactttgggaggccgaggcaggcagatcacctggggtcaggagttcaagatcagcctggccaacatgatgaaaccctgtctctactaaaaatacaaaaattaactgcgtggtggcgcacacttacagtcccagctactctggaggctgaagcagaattgcttcaactgggaggcgcaggttgcagtgagccgaggtctccccgctgcactccagcatgggcaacagagcgagattccatctcaaaaaaaaaaaaaaaaaaaaaagaggctgggcagagtgcctcatacctgtaatcccagcactttgggaggccgaggtaggcatatcacctgaggtcaggagctcaagaccagcctggccaaaatggtgaaaccctgactctactcaaaatacaaaaattagccaggcatggtggcaggctcctgtaatcccagctactcgggaggctgaggcaggagaattgcttgaacccaggaggcggaggttgcaatgagctgagattgtgccgttgcactccaacctgggcaacagagtgagacactgtctcggaaaacaaaaagcaaaatgccaggaggcactggagatggcagaggggagggaggcagaggaaatggtgtgtggaaaggccctggggtggcacagtcttgcttgtctgtggacagtgaggctgtcattgctctctgtggatgtttctctcctttgagtaatgtcagggttgggctagatggtcattctcaccgtggagctactctgcccctgaggacgcttggcaacacctggagatgtgtttggttgtcataactcggggagagggggtgttgctggcatatagaaggtggagaccagagatgctgacactctagaatgcacaggacgcccccacagcaaagaatgagccagccccagatgtcagcagtgctgaggctgagaaacgctgtgatcaggcccccatttccaacctgttgacccaggtccacaggttcttctaggtgtttattttatttttgttgttgttgttgagacagagtctccctctgttgcccaggctggagtgcaatggcgcgatctcagttcaccgcaacctttgcctcctgggttcaagtgattctcctgcctcagcctcctgagtagctggaattacgggcatgtgccaccatgcccagctaattttgcatttttagtagagatggggtttctccaggttggtcaggctggtctcgaactcccaacctcaggtgatccgcctgccttggcctcccaaaatgctgagatcacagtcctgagccaatgtgcccggcccaggtgtttattttttaaaagccgtcgtttggcgtggtagctcatgcctgtaatctcagtactttgggaggctgaggtgagaggattgcttgaggccaggagctccaggccagcctgggcaacatagcaagaccccatctccacaaaacatgtacaaattagccatgcatggtagtgtgtgcctgtggtcccagctacttgggaggctgaggtgagaggatcacttgagcctgggagttcagggctgcagtaagctataatcgtgctactgtactccagcctgggcaacagaatgagactgtgactcaagatgaatcaaaaagcccagggccaagcaccatgcttcattggtgtctgggttgtggtttagggctgatgctgacctgcttggcccagtaggtggcgccagtgacccatgctagccacagctcctggtttccacaccctgggtagctgagacactggccctctaggcaaccccccagcttaggggctgctatcctgacaacatgcccagttcttggggggaatctggacattcccacctgttttacccgtcatcttttttttgtttttttaaagacggtcttgctctgtcacccagactggagtacagtggcaggatcacagctcaatgcagtcttgacttcccgaactcaagcaagcctcctgcctcagcctcccaagtagctgggactataggcgtgcaccaccacgcccagctattgtttgtattttgtgtagggggtgggggtcatctcactgtgttgcccaagttggtctcaaactcctgggctcaaacagtcctcccacctcagcctcccaaagtgctgggattacaggcatgagccactgcacctggcctcccattgtctttctgtgaaggggtagatcctgccttgtttttagcacacattcaatgtccctggctttcttccagccccacccctacccaccctgctgcactgggtccatggagatatttatagtttgggggttgggggatcatcaaaattttgacactataggaaagttgaaaactcaaaaggaaaaacaatgtctgtcaaagatgcagtatccatccgggtgcggtggctcacgcctgtcatcccaggactttgggaggccgaggcaggcggatcacctgaggtcaggagttcgagaccatcctggccaacatggtgaaaccccatctctgctaaaaataaaaaaattagctgggcgtggtggcgcgcacctgtagtcccagcaactcaggaggctgaggcacaagaatcacttgtacctgggaggtggaggttgcagtgagccgggatcgcgccactgcactccagtctgggtgacaaagcaagagtccatctcaaaaaaataataaaataaaacaaaaagatccagtatccagacagaatccagagacctttccgcccatagtgtcaagatcattggcttaatcctccctgtggcctgcgtcttggccactggggttggccccatcctctggatgaggaaattgaggcagagaaggcagaaagcccagatcacgtggctatgaggaagagctggagccagactggcaccttctcctttgttaagaggctttttttttttgaggcagagtttcactctgtcgcacaggctggagtgcagtggcgcgacctcggctcactgcaacctctgcctcccaagttcaaacaactctcctgcctcagcctcccgagtagctgggattacaggtgtgcgccaccatgccaggctaatttttgcatttttagtagagatggggtttcaccatgttggtcaggctggtctaaaactcctggccccaagtgatccttccacctcggcctcccaaagtgctgggattacaggtgtgagccaccgcacctggcctttttttttttttttttagacagtctctgttgcccaggctggagtacagtggcgtgatctcagttcactgcaacctccgcctcctaggtccaagcgattcttttgcttcagcctcccaagtagctgggattacaggcatggcaccatgcctggataatttttgtatttttagtagagatggggtttcaccatgttggccaggctggtctccaactccttacctcaagtgatccgcccacctcggcctcccaaagtgctggaattacatgcgtgagccaccgcctctggcctgttaagagatttgattaagggacagcaaagcatgcctgtcctaggagtgtgggtcagaaagcatgtacctctgagcacacctgtattgcatgcatccgggacaaggtatggagggggttggacaggcaattggggccaggtggtgaatagcttagacttcacttagggccagacaggaagccactagaccctatcattgagcatgaaggccaccactgacagtaggttagcaaataggtgtggctgcatgcccataaaactttaccaaaggggccgggcatggtggctcacacctgtaatcccaacactttgggaggtcaaggcaggtggattacaaggtcaggcgttcgagaccagcctggccaacatagtgaaaccccatttctactaaaaatacaaaatattagccgggcgtggtggcgggtgtgcgtaatcccagctattccggaggctgaggcaggagaatcggttgaacctgggaggcagaggttgcaccattgtactccagcctgggcgacagtgcaagattccacctaaaaaaaaaaaaaaaagggccgggcgcggtaactcattcctgtaatcccagcactttgggaggccgaggtgggcagatcacaaggtcaggagatcgagaccatcctggctaacacggtgaaaccccatctctactaaaaatacaaaaaatcagccgggcatggtggcaggcacctgtagtcccagctactcaggaggctgaggcaggagaatggcatgaacccgggaggaggagcttgcagtgagccgagatggcgccactgcactccatcctgggcgacagagcaaggttccgtctcgaaaaaacaaacgaacgaaaaaaacacaaaaaacctttaccaaagaaggcagttggctagttggctatagtttgtcaacccctgctctctagaatattctcagcccccgtgagtttccctcatacccctcctggtcagtcccccaccagtgatacctctcctcacttcaaacatcatgcattggccaggcacagtggctcacacctgtaatcccagcactttgggaggccaaggcaggcagatcacttgaggtcaggagttcgagaccagcctgggcaacatggtgaaaccccgtctctactaaaattacaaaagattagccaggcgtggtggtgggcacctgcagtcccagctatttgggaggctgaggcatgagaattgcttgaactcgggaggcagaggttgcagtgagccgagatcgcaccactgcactccagcctgggcgactgagagagactgtctcagaaaaaaaaaaaaaaaggaccctgtctgaggcagaatgtgtgtgtgacacgcatcggtcggggagcctcgggacgttgcctctgaccgagggggaaactaaggctcctcagcacagcaatgggagcccagtttgtgcactccaacagccttgactttaaccgccccctccactttcctgctgtgctggtgggggtgggggtcaggccctggcagtgtccttaggtgcgtccacccctattctgcgacattcccttctgtcaaatctatctggagatgcagtggtagtgtcccagggggacactgcaggtgtggggatcgtccctgggaaggctgaaggtgtgagagtcagatggtggagtctcaggcagtgagggggcaggcaggggtgtccgagaccagggccctgcaggagtgccaggcagtgggcagagtactgccctgagcttccagcagcactgcatataaaccgtgggcttgctcggccccctggggtccgtgcaggccagggcaagggcaagtcccgtagcccagatgtccctcatccagccagcatcagggcttccctgggcggccgatgtggaatcagtttcagcctcagtgacccacggcagggaaacgtggacagtgctgcccgactcataagggcagagcccctgccctagcctgaaacgggtccaggcctcccacggctcttagaatccaacatgaacccctccctggcccccagaggctccgcatggcccagccgtctccctcccggcctcttccccctcccgcttcactcccactccagcctccaagctgttcctgttacaacaaatggctcctgcctcggcgcctttgcactggtagccctgctgctaaggacgctcctgttccccagctctcccccttggccggcgctcttcgcacctaggagcgtcacttcttcaagagccacccacccgccctgtccaaggttcccctgttggcctcacatcccccgcccagggcagcaccgggacctatcttgttcctggtatgtcccctgcacccagcacagagcctaaatcctcgttggctgagatgaaaactcgaaccccaggctagtgggtggcgcgggggtgtggggtcttctgcctgaccatgcacgccgcccccgcaggaggagaaggagaagcggcgcctcgaccagctggaacgtaagaaggagacgcagcgcctactggaggaggaggactccaagctcaagggcggcaaggcgccgcgggtggccacgtccagcaaggtcacccgggcccagatcgaggacacgctgcgccgagaccatcagctcagggaggccccggacacaggtcgggcggcatcccgctctggagctgcacttttgcccactgcagaggcagtggaccttgagtccattagccccctcctggcccccagagaagctgccggggctccacgtggtgcagggtgggtgggtaggccgcctcctggtaggcctggccgtgagcagacaacctcagggcttgtgccccgcggggtcctcttgtttgcagggctgccggaaagtaaggcagagaactgggcgccgggagggtgggacctgtcccaagagggcttatcagctgaagtcgcgattccatcccccctcatctctcccgccttcctcccgcccctagcttctcttgccagtctctatctcatctccttggaactgtgcatctttgcttatctctctctgtctctgtcacccacccacccgcccagccgagaaagccaagagccatctggaggtgccgctggaggagaacgtgaaccgccgcgtgctggaggagggcagcgtggaggcgcgcaccatcgaggacgccattgcagtgctcaggtaacggggcggggcctggggctttcccaggggtggagctggtcatcgggggcggggctacctgggggcggggccgggcttttcggggcaaggctgcgcccaaggccccctgacgctcatgtccacccccagcgtggcggaggaggcggccgaccggcacccagaaagacgcatgcgggcagccttcacagcctttgaggaagcccagctgccgcggctcaaacaagagaaccccaacatgcggctgtcgcagctgaaacagctgctcaagaaggagtggctccgctctcctgacaaccccatgaaccagcgggccgtgcccttcaatgcccccaagtgagcccagaacttggggagccagttcacccacgggtggtccaggtcacgactctgcacgcccttaggccaggtcagctgcgagggtcacagagcgttccgggggccaaggcgccgggccccggggccatgctcttatcaccagccacccgtcctcccgccagagggtccctgccccgagtgacaccccatcccctcccatcccccggcgcgtgtgtgtagagcctcagggctgagtgcccaataaaggtggcggcaaggctgcggtgaggcacttgaagcctaagtgagtgggtggggagaggcgggcgaagaatggggagaaggaacagctttggggacctgctgtgaaccgcactgggatcatagctagaaaagacaagagcccccaacagcgcgctccttcctgctgccagctgtgcttcatcggctcctgccagcacccctccttggctgtgccacttgtccagtgaggcacctgctccactgtctcctgcacacgcttagagaggtggaggtggaggcgctggccatacttcagaggcagagccagagaagagctggagcctgtctgccttctgagattccagttcagggtgggccctaggacttgattgggggtaccatgttgtgtttggggtcaggaaatgctggctgctctgctgttattcctacaggggaggcatctgggccaaatccttctgtgctgaatcctgggcaggcttcccagtggaggatttcttccttagtgggggatgagtcagatctcattgcagagggaggaggaaggcactgggctgggaaaggcctggaggctgcagtgagcaggtggatcggagtgggtgtgagcaagcgtcccgtcagagactgcacatctgggaagggtggagtgggatttgaacctagttctggcttcctagaacttagccagcccggaagaatagaggaagggcagctgggagatgggcctgtgaggctttgtgggctgagcaaattgcttggactcatgagggcggcaggggatggaggtgcccccagaagctgcagtggtcagggccgggtgcggtggctcattcctgtaatcccagcactttgggaggccaaggtgggcggatcacctaaggtcaggagttcgagacaagcctggccaacatggtgaaaccccgtctctactaaaaatacaaaaattagctgggtgtggtgacgcatgcttataatcccagctactggggaggctgaagcactagaaccgcttgaacccaggaggcagaggctgcagagagtcaagatcacagcactgcactccaacctgggcaacagagcaagactggcaacaacaacaaaaaaagttgcagtggtcagatcatctgcagcacttacccagtgggctcgggtagaggttggagcagcccctggtgcaagaaatggccatcaagtccccactgtgtgcctggccttggacagccctgctgtccaaggtcatccataacagtggggggaactgaggcacaagggtagagggtagggttgaaggacttaccaggccactgctgtggctcttgcccaggtgacacccacttcctatgcccatagggctgtcccctgactccccattaccctctcagctcagtacttccagcctccttactcttggcttctgagaccctccaacacagaaggcttgatccctccaccaagaacaccgtcctgctgggtgcggtggctcaggcctgtaatcccagcactttgggaggccaaggcgggtgggtcacctgagctcaggagttcgacactagcctgggaaacatggtgaaaccctatctccactaaaaatacaaaaagttagacgggcatggcggcaagtgcctgtagtcccagctactcgggaggttgaggcaggagaatcgcttgaacctgggagttggaggttgcagtgagccactgaactccagcctgggcaacagagcgagactccatctcaaaaaaaaaaaaaaaaaaatcactgtcctcccagatcacaaggcttagtgcatgcaggtccccacagaggtcctcagctctgtgtagtcagggctggagggctgggcaggctggaaggggctaggctctgcccagaggtgggagatagaatgtatcatggaggacgggactttcaggatgcataggagctctccacacagacaagggacagaaaagtcgaagaaatcacatgtgcaaaggtctggaagtcacactgcttcctgttcaacggagggtaaaaggtgccaggaataactaggtacaggtgaggcacggtggctcacacctatctataatcgcaggactttgggaggccacagtggaaggatcttttgaattcagcagtttgagaccagcctgggcaagaaagcaagactttgtctctacagaaaaagtttaaaattagggcgtgatggcatgtgcctgtggtcccaccttctttggaggccgaggtgggagaatcccttgaggttgagttagaggttgcagtgaggaggttgcagtgagccataactgtgccactgcactgcagcctgggcgacggagcgagaccccgtctctaaaaaataaactgggtacagctgaagttaacataaaaactaaccaacatatgttggacactagcttagtttggaggtcccccaagaaccaaccctgagacaatgactgtaggaaacgtgggatatctgggagagacctttggtgagggttagggaaaggagaggaaggtaaggccccctgcatcctgcagggggcaccaacgagcagagtcccccacgtgggaggagacaggcagtggcaccactgggtgccaggccttggccaaacaggtggcagcagcccctcactgagccctggggacagcccctatgagatattgatcgtctttgtatataagaaaactaaggctgggcacagtggctcacgcctgtaatcccaacactttgggaggcccaggtgggtggatcacctgaggtcgggagttcgagaccggcctgaccaacatggagaaaccccgtctctactaaaaatacaaaattagccaggcgtggtggtgcatgcctgtaatcccagctactcgggagcctgaggcaggagaatcgcttgaacccgggaggcggaggttgcagtgagccgagttcatgccactgtactccagcctgggcgacagagagagattccatctaaaaaaaaaagccgggcgtggtggcgggcgtctgtgatcccagctactctggaggctgaggcaggagagtcgcttgaacccgggaggcagagtgagccgaggccacaccatcgcactccagcctgggcaaggagagcaaaactctgtctcaaaaaaaaaaaaaaaaaaaggaaaagagaaagaaaactaagtcacctgcctgtgtcacatagccgggaagcacccagagccgccaggaaggcagcaggggtagttttggggcccagaattggggctgaagatgtcagccaggaaatgaatggaatagcccatatagctccccacaaatggaggcctgggtttgaatcccacctctgactcttctgagaccttagacaaggttctgaatgatctaagcctcagtttctccggtaaaataggactaaaaaccgcgcccaaccccaggctatctggagaatcaaggagatggtacctgggaagggtacgtggggaagggcttggcccacatgaccatattagggtctttctggctggggatgagagaaggtcggggaccaatggtaatcgatccgagggaagaagccgacgggagggccagccagacacgactgggcacacagggcctcggacgccaggcaaaggagtggggcttcaccccaggacgatggggagccccggtggggttatgagcagggcagagagccgatcagagcggcgcgtggcaggctcttccgggcgcctgcagagggacaactggtggacaagagtgaggatgaaactcaggacaggagctgagagggtggtcgtcagccctcgggcacaaagacaaggtgatgacgtttgttccctgttacagaaaggcccttactcccttcggctcctagccccggccccggccccggccccgcccccacccccgcccccgcggaatcccaggctcgcgcgtgcgcactggcagcagggaatccccagctccgccgcagagagcgggagggggcgtgagaggggagttccgtgcgcgcccagccggccccgcgtgcgttgccaggacgaccgggcggggccgcggggccgccggtcgctcactgcgcctgcgcgggggtgctcgccatttgcgccggggctttcccgtcgcgcgccagcagaagaggggatgccgcgcccagcgcgcatgcgtcggccccacccgacaccccccgccccccgcccccaacccacccaccctgagggccggggaatcctcacccgccgcagtgcgcatgggggcggggcggggaaaccggttcaaaccggagtggggtttgccgaggaggtggcgggggagggagcgagagcggggtcttcccgaggttcccactccggcccccgccgttgccttagcaaccgggcgcgcgggccgcagtgcgcgggcggcggcggcctcggggaagccgggtggctctgcgcctgcgcggggctccgcgcctgcagccggggttccccctcgagcaccggggggacggcgggggagtagaggatgggcgcgggggagcgggtgctggggaggaagagaccgtgggggaagagacggcgcgggaggaaagaaggggaggaggggtgggtgccgaggagggggcggtgggggaaaacgcaatgggtagggactgtagggaggggtgcagggagaggcgagcctggggatgcgcgccagggagggggtgacgggggagagcgtagagggagggggacgacaaaggcggagggggatgggagggggagcttagggagtagagaagggatatggacaaggagaggggtacactgggccagtgggggcgatgggagggggagctgggggacaccttaggcacctgcagtctcccgcccagcagattggtctgcgagggtgggggttgctgtgccagaaagtcaggatcttcgagtccgagcttaaggtttccagatttagaaaaaaaaaataaaaaaacagggcgcccacttaaacttgactttcagataaacgagcaattttttattataagtatgtcccattccgtgtcctctactttatcccgcagccctaatctgggctattgtcgttcccccccaccccccaatttacacaccatctgtccctatccttttcgaaagctgtgcggaccctcgcggaagacgcctttgtctcccgcctgcctagcgccccacagcccggcatgtggggtgtacccccgggccccgtcatcccctcccccagccatctgccgtcctcctggccttgaacaacagcctgaagtcgagtccgggctaggcaggggaaagcgcaaaggtgcagcacgcaccctcggggattttctcagcgctcctcaccccccacgacctccaaaccctccgctatgggcctggccctgccaaggccacatcgccccgcgggtcccagacacccgcaccttctccttctccaggaacctccagggctctgctttcgggcagcctccctcactctctgggcacaaaagcacacaggcacgtagtaggtgctcatgaaaaaaaacatttgagggtgattttagggaggcaagtgcaggtgagggagtgttgcatttctcgacacggacaactgcgtcctcatcccatggggacatataccctctctgggcctttgtcccctccaacaaagcaatttcccttttatccttccctttggtttcaaaaagtgtaagataacaaaacactttgttttgttatcaaaacacaatcaaaggggggaaaggtcagccccccaggggtccctggccctgggctgcccccagcgtctcccccaacacttccccaacttgccacgttcgcttcttttacttattcgccatcggaacggtggaacatttgcgcctccggcctggcttctgctcaaccggccaggagctcggtccctgcggatcattttccccaggggcatattattccggaaacgggctaagcggtcccgggttggggacacgtcggctcctgtgtttttagtttcgctggcctaggtgacccccctgcagaagacggctgtggatctgctgtgccgtgtcttggaggcatttctagggcggctagctgggcaaagggtggtgctgtccctttatttggagctaggtagctcctggggtggtgctgggtcgggagcggccctctcctcccatcagctaggaccaagttgcacctggcccctcattcccaggggcggagagaggagaagatgaaagagcaagcaagttcacaccagggcttgagggcagtgagaacagtaaaccagggcgacgtgcccagagaaggggcgactctagggaagaggcgaccttggatggagccctgaagagccctgtgggaacagggggtgaggagagccagggaagggcgatcccggcccaagaaaccgcagatgcaaaggctctgaggctgaaccggttagggggagaagctgggcgtgtccagaatgtggtgggcggtccagggagaccgcggagggattggaacaaagggtgggcgttgtggggggcagaccgcgtcggcctgtgaggagtcagggtgctcctcttggttcaagaagagaagggaggtggggggagggcggtcatgcgggacagggacgtgacctgtcacacgggtgaggactgaagtctgtggctgcgtcagggagaaggactgtggcggggacaggaggagccgcgggagtggggaggattttcgggctccactgggcgattgtggggtccacggggcgtgggggaatcccctgatcatgggtgtccttgtcacttctgcagcctgactctccttcactgtgtctgactaaagcatgggtcgcagccttccccaacaggggcgggaagtcccccccggggagggtgttgggtggcaccccttgtcctcggctcctgcgaacccaccggctctctgcctccacagtgcagacccgaaggcctcctcccctttgttctttttccctccacacggtcacggtcacaccggcggctccctctgagcgcatctcacacacaatgggggtggggggtgcgctcccagtttcccctcctctcagtatcggcgtccccgagccccgcccgcgccacggaatcccggcctccagaccccgcccgggaagctcgttacctttccagagaggctccccgccggggggctggggaggggggagggctatttttagaatgaatggaagaaaagagaggaaaaaaaacaaaaaacaaaaaccagaatggaggtttgtagaagcctccctgcttccaagaggaacccccctccctgtcccctgcctgaaggtggctgaaggtccccaccaaggctgaaggtgggtgggggttcagagacggggcggagcaggggacttcgaggaggaacacggtggtctgagctggagccacgctttctgttggagggggcagctgaaggagaacagcaagacatatccggcggccctacggactcggagagctggagggaccccggaggtgggcacttgtccgttcgctgaagggaaactgaggctcagaaaggggcttggcagggccgaggtcacggaaagggcttgcccctggacttctccctcccatcccctaccgagccagaccccgcgagccacattgttctaaggtggcagagtgaccttcacaactctgccacccaagcccgggccagtcaggctcaagaggttcctaatcgcgcaggttggggggagggtgtcaccagcccaacaatgaaatagagaagttttctgtggtttggttctggccacccaggctcccccttcctagctgggaccttccagcccggtcaacgtcgccagctgcccgaagcctctgggtcccccgatcctccccagtggcgtggtggggaggctttaattgtctgccttcctctctccctgactctcttctttcccggagctgagagagcggccccccagagtgaggggagcagccctgttccgtgctgctgggacactgggccctggccaggggcttccgctctccgggcctcagtttccccgtctgtaagatgagcaccttgggccagaggcggcagagggtcctcccatctctttgaccgtcttctaagatttgctgtcacgcccctgggtggaggggggagagtgggctttggcgagagacctggagggggattccatccctgctttagaggagacgccttgcgggggggagggccccggctgtggccgcgacggactgcctccctcggcctgcggggtccgcgccccctccccgggcggcggggcggggcccaggtcggcggggagggggtcggctctgcggcggcgcgcgcacaccctcccggctcacacgcccttgcccggccgtgcacttgtcttcgcgctcgggcagggcgcagggactccggctgcggcggccgactccggccggtgagtggcagtggggggcacggcggggagcgttcggtcccggcggcggtccccttctctttggtgggcggattggtcaaagcttgcccgactccgggaattcaaaggggagctgcgggaggagggggacatcccttcttcaacccccgcctccaacaccgatcccgggagtcagctcctgaccccacccccatgccctgtgaggagggggttcctgcttccaggtctggggaagcgcagacatccccctccctccgcgaggtgaaggtggggacatggggatcctccacgcctgcaccctcctcagtggtggggggaaagcaccgctggttcccgttgccccctcctccctctctgtcccctcaggtttctccctttctccttgcgttgtggcggggattccctgtgctggccaggctgcgcagtaggagggaaccccccacctgccagcctactgtgcgctgggctccgggttcctgttcttttccctaagctccctcccttcccccctcccctctcccggacaggaggaggggctgaggcccagagagggttaccactcgcccaaggtcacccagctgggctggggcagagcaggtttctggtcagatccacgaatcccgggacccagctggggaggtcagctttgggatcctctgcccccgccgccgtttaaccctgagcgtgggttgccagggccccagaactggggggattccttactttctccaagtttctcctctggctagagacccagacaggactgagccaagaagccccggcctcgctctcttccggggctcccagatctcacctcctcttgtcccccgtgtgcccccgctcccagcctcctcaggctgcccaagacctcatcaaaggaaatccctggggggagggggcttatagatggggaagtcaaagcttctggagccacggaggagataatttttactccgacgcagcaacccgctgagtgaccttggacaaggccctgccctcccaaggctagggtcagcaccaagtccccctggctggaacaggtggcccctgagccatccaaggtgaccattgccccgatcccaggtcctggtgagagaaagggcagctgggggtttccccttcagtcctgttctggggtctggcattgcccctgccctccatggggtgtccttttctgccctcttctccaggatcggacttgggtaccatgtgcttctataagccctctgcagacagcactaaatagatggagggagcacgccaagggagctacaggctcccagggcagcttcagagctggggagcaagagttcagctgctctgccaagcgaggtggttcacaactgtaatcccaacactttggaagggcgaggcaagctcaggagttcgagaccagcctgggcaacgtactgaaaccctgtctctacaaaaaattaaaaaaattagccaggtgtagtggtgcacacttgtagtccaagctacttgggggccgaaggtgggaggatcgcttgagcccgggaagtcaaggctgcagtgagccatgttcatgcgactgcactccagcctgggtgacaaaatgtcacctccctgaatgtcacccacctagatctccccatggcgaaggaactaggggcaatgtgagggggtgagcaggaacagcattgggaaagacagataaagcattcagtgtctagcttctggagcccagtgaaaggaggagtggccttagggaggggacatggaagaggtggggctagcccagggccccattggagtgataaagccactgttcttaagcttcctgaaagcttaggagatgacccagctcagcaacaccaagccagagcgcagatctgctgtaaagaccattgtacgtaataggctgaagcaggtgaatcacctctggccaggagttcaagtccagcctggccaacacagcaaaaccccatctctactaaaaatacaaaaagtagccgggcatggtggcaggcacctgtaatcccagatgcttgggaggctgaggcaggagaattgtttgaaccctggaggcggcagttgcagtgagctgagatcacatcactacactccagcctgggtgacagagcaagactctgtctcaaaaaaataaaaaataagaaagaccactgtagtccgggagctgtctgcaccctactcttttgggtccccgcctccaccccgcaccccctgtctgatcattacagatctcaaagggacaggaaaggcagcagcagccaccctctctcccagtcaagtggtcaccagcaggactgaaggggacagcccctttgcagtggctcggcgaggagacccctgcaccctagggtgagtgaatcccagacttgggtcgcctttgggggtgggggtggctcaggggttggatagaaaaattggtaactgggcaggctaggtggctcacgcctgtaatcccagcactttgggaggctgaggcaggtggatcacttgaggtcaggagtttgaggccagtttggccgacatggcgaaaccccgtgtctactaaaaatacaaaaattgcccggggatggtggtgggcacctgcaatcctagctacttgggaggctgaggcaggaggaccacttgaatccgggaggcagaggttgcagtgagccaagatcgcgccactgcactccagcctgggcgacagagcaaagctctgtttcaaaaaaaaaaaaaaaaaggtgacctgaggaaaaagtgccagcttttgaaataataacaagctgggtacagtggcgtgcacctgtggtcctagctactcggaaggctaaggtgggagtatcgagtccaggagttcgaggctgcagtgagctatgatcacgcttgtgaatggccactgcactccagcctaggcgacagagcgagacccccatctctttaattaaaaaaaaaaaaaagaaaaaaggccagacgtggtggcttacgcttgtaatcccagcactttgggaggccaaggcaggcagatcacctgaggtcaggagttcgagaccagcctggccaacagggtgaaacccccatctctactaaaaatacaaaattagccaggcatggtgctgcatgcctgtaatcccagctacttgggaggctaaggcaggagaatcacttgaacccaggaggcggaagttgcagtgagccgagattgtgccattgcactccagcctgggcaacaagagtgaaactccatctccaaaaaaaaaaaaaaaaagaaagaaagaaaaaaaataataatataattattattatatcatatatatcatgatgatgatagcaaggactatgctttctagagcctccggggagttactgtccactttctttgatcactggagttggggaaactattcagagaggccagatgacctagaagtggggtgttgagccaggttggaagagctctgtcccaccactcccgcccccgccccccacacacagcctctacttcccggctctcgtggtctcgctggagacagcccccagggtaggccagctctgtggaaggcagctcctgtgctcctttctccagtgaactttttttttttagttttgttttgttttgttttgtttgtttgttttgagacagagtctgactctgtcgcccaggctggagcgcagtggcatgatcttggctcactgcaacctccaccctccaccccaccgggttcaagcgattctcctgcttcagcctcccaagtagctgggattacaggcatgcgtcaccacgcacagctaatttttgtgttttcagtagagatggggtttccccatgttggccgggctggtctcgaactcctgacctcaggtgatccacctgtcttggcctcccaaagtgctgggattgcaggcgtgagccactgagccaggcctccttggtgaacactgactgacatccagggtcagcactaagctgcccatgggggtgtggagaaaacagaggtggtggtcatttagtcaatcaacaaacactgagcaagctagctactgtctgccaggccctaggctggatgctgggatgcaataaggacaaaggccagcccaggtcagcccttgtggaatttcatggggcatcaattaagcttaagtgttttgtgctggatacagtggctgatgcctgtgatcccagaactttgggaggccaagacaggaggatcacttgagctcaggagcttgagaccagcctgggcaatgtagcaagaacccatctctacaatttttttttttttaaattaaccagtggggtggtgcatgtgtgtggtcccagctactctggaggctgagatggggggatcacttgagcccaagaggtcgaggatacagtgggctatgattgaaccactgtactgtagtctgggtgacagtgagactctgtctcagaaagaaagcgagaaagagagaaagggggccaggtgtggtggctcatgcctgtaatcccagcactttgggaggccgaggtgggcggataatgaggtctggggatagagaccatcctgcatggtgaaaccccgtctctactaaatacaaaaaattagccaggggtgatgtcgggagtgcctgtaatcctagctactcaggaggctgaggcaggcaggagaatcgcttgaaccagggagttggaggttgcagtgagccgaaattgcagcactgcactccagcctggcgacaaagcgagactgtctcaaaaaacaaaacaaaacaaaacaaaaaaacaaaaaacagagaaagggagggagggagggacagagggagggaggaaggaaggaaggaaaggatggagggagagagagaaaaaaaggagaggagaggggaggagaggagaggggaggagaggggaggagaggagaggggaggggaggggaggggatggtggggaaggggaaagggaaagggaaaggggaaagggaaagggagaagagagagagggagggtaggagggagggagagagaaaaaaagaaggaaggaaagaaggaaggaagaaaagaaagaagaaagaggaagggagggagggaaggaagaaaattgttttgtattaggaagaaaatagaatatgaggatgtattagtgaccagaggagcagggaagcctcttgtaaaagtcagagaggcctctctagggcagtgatcatgagctgagacttgaaggaagaggaggaactggcctgctgacagctgggggaacagcatacccagcagagggaaccacatgtgcaaaggtcctgaggtgggaatgagcttggcgtgtttgaggaacagtgaggaggctgctgtggctggaacagagtgagtgggagagaggaggaagatgaaggcaagatcggcaggtaggagccaagctacaaggaactcagcggctgcagtgagggtgtggacttcagagcaatggggaaccatggcaggtgtgtgagcaggggagaggcatggtctcagttaggattttcagaagccctgtggctgctgtggagagcagggcaggagtggaggtggcaggagcccagagtggaggcccaggagatgtctggtggtttcagctgggttggtaccagggtagagcctcagatggaaaaaagtgggcacattctgggactgggttggggatggaggatgaaatgtggccaggtttccatctcatgccaagtagctactgtgagagaagggagcactcattgtgcttggggaaacctgggaaggcatcctggaggaggtgctctttgggctgagcctggaaggtcaagtagaagcttgccagcagataaggctggggtcatgtgggatctaactgctcaaatgccaggggatcactgagcacccagaatctggggcagtataatcagatttgtaaccaagaaagatccctgtaatcccagcactttgggaggccaaggtatgaggatcacttgaggacaggagttcaagaacagcctcagcaacatggcaagaccccatctctacaaaaggaaaaaaaatagctaggcatggtagcacacacgtagccccagctactcaggaggctgaggtgggaggatcacttgaggacaggagatcgaggctgcagtgagctctgactgcaccactgcactccaaactgctgcgagacaacaggagaccctgtctctttttttttttttttttttttttgatacagggtctcactctgtcatccaggctacagtgcagtgatgcaatctcagctcactgcaacctccacctcccaggctcaagtgattctcgtgccttaacctcctgggtagcttgggactatagataggtgcctgccaccgtgcccggctaatttttattttatttatttatattttcaattgtatttatttatttatttatttatttatgagacggagtcttgcctcgtcgcccaggctggagtgcagtggcgcgatctcggctcactgcaagttctgcctcccaggttcacgccactctcctgcctcagcctcccgagtagctgggactacaggcgcccgccaccacgcctggctaatttttttttgtatttttagtagagacggggtttcaccgtgttaaccaggatggtctcgatatcctgacttcgtgatccacccgcctcggcctcctaaagtgctgggattacaggcgtgagccaccacgtccagccctatttatttatttatttatttatttatttattttggagacggagtcttgctctgtcgcccaggctggagtgcaatgacgtgatctcggctcactacaacctctgcttcccaggttcaagcgattctcctgcctcctgcgtcagcctcccgagtagctgggattatacgcgtgcgccaccacacccagctaattttttgtatttttagtagagacggggtttcaccatgttggccacgctggtcttgttttttgttttgttttgttttgttttttttgagacagagtctcgctctgtcgcccaggctggaatgcaatggtgcgttctcagctcactgcaacctccgcctcctaggttcaagtgattctctgcctcaggctcctgagtagctgggattacaggcacctgccaccacgcctggctaatttttgtatttttaatagagacggggtttcaccatgttggccaggctggtcttgaactcctgacctcatgatccacccacctcggcctcccaaagtgctgggattacaggtgtgagccaccgcacccggttatattttttcaatttattctttattttagtagagacagggtttcatcatgttgcccaggctggtcttgaatccctgagctcaggcaatcagcccaacttggcttcccaaagtgctaggattacaggcatgagccatgggaccctgtctcttaaaaataaaaaaatgattccctctaggtggggggctctgggggaggttacacccgagtgaaagagttcaagaggtgcttttgaaatagtccaggtcagctggacgcggtggctcaggcctataatcctagcactttgggaggctgaggtgggcggatcacgaggtcgggagtttgagaccagcctggccatcatggtgaaaccccgtctctactaaaaatacaaaaattagccgagcgtgatggtgggcacctgtaatcccagctactcaggaggctgagacaggagaatcacttgaacccaggaggtggaggttgcagtaagcggagactgtgccactgcactccagcctgggcaacagagtgagactccatctcaaaaaaactaaaccaaacaaaaaaacaaaaaaaaaaaagaaaaagaaatagttcaggtaatggtcaggccagttgcagctgtaagcattcatggagcactagtgctgaacctcatgccactggcctccaatgaggccatatcattgccttgcagaggaaatggaggcctagagttacaagtcccttgtccacaatcactgccttcattcctgtggctgccaccacaaatgaccatgagctggatgacttacaaccacacaaagttggccaggcggggtggctcacggctgtaatcctagcactttgggaggccgaggcgggtggatcacctgaggtcaggagttcgagaccagcctggccaacatggtgaaaccctgtctttactaaagatacaaaaattagccaggcgtggtggtgggtgcctataatcccagctactcgggaggctgaggcaggagaatcgcttgaacgtgggaggcggaggttgcagagagccaggatctcaccactgcactccagcctgggtgacaggagcgaaactctgtctcaaaaaaaagaaaagaaaagaaaagaaaaacacacaaaaagttgtgctgtcacagttctagaggccagaagtccaaaatcaaggtgttggtggtgttgccttccctccggaggctctcaggaggatcctttcctgcctcttccagcctctggtggctcctggtgttctttggctgtgtcacccccacctctgtctctgttttcacatgaccttctccctgtttgtccatctgtatcctcatatgggcttcgtattaaaaaaaacagttgttagatcagagcccaccctaatctaccatgagcccctcttcattgggtgggccaaagcaggtagatcacttgaggccaggagttggagaccaacctggtcaacatggtgaaaccccgtctctattaaaaatataaaaattagccggctgtggtggtgcgcgtctgtaatctcagctactcaggaggctgaggcaggagaattgcgtgaacccaggaggcggaggttgcagtgagccgagatcacaccactgcactccagcctgggcaacagagtgagactctgactcaaaaaaaaaaaaaaaaaaaaacccagaaaccagttattagatcagagccagaactaacccactatgaccccctcttcatttaactacatctgcaaaaaccttgtttccaggccaggcacagtggttcacgcttataatcccagcactttgggaggctgagatgggagcctcacttgagcccaggaatatgagagcagcctgggcaacataatgagacctcgtctctacatttaaaaacaaaaagaaaagaaaaagaaacaggagaatctcttaagcccaagagatagaggctgcaatgggcgtgatcgtgccactgcactccagtgtgggtgagagagtgagacccagcttcaaaaacaaaagaaacaaaaccctattttctttctttctttctttctttctttttttttttttgagacggagtcttgctttgttgcccaggctggagtgcaatggcacaatcttggctcactgcaacctctgcctcccaggttcaagcagttctcctgcctcagcaccccctagtagctgagattacaggcgcgtgctaccatgctcagctaagttttatatttttagtagaaacagggtttcaccatattggctaggctggtcctggtctctaattcctgacctcaggtgatccacccgcctcggcctcccaaagtgctgggattacaggcatgagccactgagcctggccaaaaaaacccctattttcaaataaggtccaaggttctggggaggactcaaattttggggggtcacgattcaaaccagtccacctgcgtagcaagacattggggtttggagtcaaacctttgctcctctatggagctgccacagtggggagagaggggttccctggagcaaatttatgggatcggttggacccactggatgtgggggtggtaaaggaaggaggctagagccttctagcctgagcgtgaggagggaggggcgctcatgtctgaatggacaggatgggacagtcccagggtggggccgctggtgggcatgacaggggctccctgacagccttggatgctttttggggactccttgcttatgatggagctgctaccctgcctgcctgtcacgcccaggctcccacttcctgctctagggctgagaacacagcaggcagcccatggggagaaccgggaaggatcaggcccagtccctcccctcccatcctgtgcccctttttcctccgtgttctgtctgcagggcccttgtgtatttatcatatcaaagccggtcttgtcttctggcctgaaactgggagtctgggggactttgtgtgtctttaccaccacagtgtccctgccttagagtacaagtcctgcacacaggaggtgctcagtagatgctgatggaaggaatcccaggtccctgaatcccgagagctcaggaacaagccctctgcgacacctgccccagctcccaccctggtattcccactccgcttcctgcccctgcagttcccaggagcccgagggagccaacactccagatcttgttttttttttttctttttgagatggtgtcttgcactgtcacccaggctggagtgcagtggcgtgacctcggctcactgcaacctctgccttctgggttcaagcgatcttctgcctcagcctcccgagtaggtgggattacagcgccaccacgcctggctaattttttgtatttttagtagagatggggtttcactatgttggccaggctggtcttgaactcctgacctcatgatccgcctgtcttggcctcccaaagtgctgggattacaggcgtgagccaccacgcccaggctttttttttttttttttttttttgagacggagtcttgctctgtcaagcccaggctggagtgcagtggcgcgatctcggttcactgcaagctccgcctcctgggttcacgccattctcctgcctcagccgccagagtagttgggattacaggcgcccgccaccacgccacacccggctaagttttttgtatttttagtaaagacggggtttcaccgtgttagccaggatggtctcgatctcctgacctcgtgatccgcctgcctcagcctcccaaagtgctgagattgcaggagtgagccactgcacccggccacctttttttttttttttgagatagagtctcactctgtcgcccaggctgtagtgcagtggcacagtcttggctcactgcaacctccacctcccaagttcaagcgattctcctgcctctcagcctcccaagtagctgggattacagttgcccaccaacacacccggctaattttttgtatttttggtagagacagggttttgccatgttggccaggttggtctcgaactcctgacctcaggtgatctgccctctttgtcctcccgaagtgctgagattataggcatgagccaccacacccagctcaaatgatttctcttctaagagacttccctgaccaccctaactcaagtctccctgtcctcgttcttagttctttcaacttttttggatctcttcctgatacttctgatacttttttttttttttttgtgagatagggtcttgctttgttgcccaggctggagggcagaggcatgatcacagctcactgtggtctccacctcctgggctcgagcgatcttcctgcctcagccgcccgaaggagctgggactacgggcacatggctccacgcctagctaatttttaaaaaatttttgtagagacagggtctcgctatgttgcctaggctggacagtacttttgtgtatctaaaattctcagttttatttccctctttggagagggttgtccccctcttctagaaagccagcttcaagaggggcacggtttgtatctctctagggtgctgcattccccagcaccaggctcagagaaggggctatgtggatatgtgaatgaatgaatgaattagtgaatgaatgaatgaatcagtgaataaataaatggctgaatgagtgaatatcttacccttgccatcctgacactcactggggcccaggttccagcttccatccgggcagtccgggctgggtccaagatttcagtggatgcacctgtggaggggtgctggggatggaggtgtagggagatgctcgtgtggccaggccactccctgctccggccactacctttgtgtccctgagctcctgtgaacgtcttccagttctcttgcacccagacccttagacactgcccagagaccagaggcccagccctcaggccccctgcggaggggcttgctctccagccgcctccaccatgcttgacgtttgcagaggacacagcctgtgcgcaaggcagtttcccagggcatgagtcccgggggcgtcttggctgcctgacaggctcacttgcaggcttcttgggtctcttccagccaaccatgggctgatgagaggctctgcctggaacggagacccagacagcccccaccagaagtcccacctccatccaaccttgactcccattcatgctgccaaccttgtctctgaggggtgggattccagcaggtggcaggactgactcaggtgggaggcaaggccgttgatcaccagattgattgtccaagttccacttcttgatgggggcagtccccgatccctcagggcaggtgaatgcaaaggagaacaagcacaggtcttttcagagggagaaggtgggtacaggggcttcagggcgtgggcaggggtgcaggggattgggggcagtggagtgctgtggctgatgtttttgtgaatttcgggacagttacatgttagacttgaattcaaaaagcatctggccaggcgcggtggctcacgcctgtaatcccagcactttgggagtggatcgcttgaggttaggagttcgagaccagcctggccaacatggtgaaaccccgtctctactaaaattacaaaaattagccaggtttggtggtgcacgcctgtaatcccagctacattggaaggcggaggcatgagaattgcttgaacccaggaggtggaggtttagaggttgcaatgagtggagatcgtgctgctgcactccagcctgggcgacaaagtgagactctgtctcaaaaaaaaaaaaagaaagaaaaaagcatctgatgctacagcctgtgcaagcagaccagggtcagcccgtgggcatggtatgcttctcgtggctcagggactcctgcaagggctgggttgagctgtcaggggccaggagcattgaatgtggttcagggatgtgcccaatcctgagggagctgtgggtggctccaatgttgtgctttagaaaggggggctcctggtggtccaggcaggggaacagcaagtgcaaaggcctggaggtgggaactgtggcgaggggagactgagaaggcttggctggaggttggagtgctggtgagtcagtggagagatgcaagaggggtggctggttctcaggtgtggctgaaaacccgccccttcggagtccccacaacccctttcttgctctgcagtgactctcaaagctgcttgtgtctggtcagatcactcgtaacagccccctgttacagatcctatccaaccccgcctggtacctctgtggatctgaccgggaccacccaggcctctatttcctgattgtctcagccctgggcattgtcaccacggccgggccttgtgcagagcagtctggacaggctgggatgaggaacgggctctccaggggagggaacaaaggtcctgtctgagactctgagccatcacctggcccctctgtgactcaccgccaccctcagcccatgcagctatccctcattcatgcctgcctgcctgcctgcctgcctgcctgccttccttccttccttccttccttccttccttccttccttccttccttccttccttccttcagtccaactgttttctgagctccgcagaggaaacacagaagacagcctccctcaggaataaacactcagatgttcctgacctgggccaaagctctgggctgggaagaaaacagatggagggtgtgggagagagataggaggtgggatctgctggctccaggaagcccccaggctggtgggggacagagctgaacacagtcaccccaagcctggtgggaacagggtgaggcagaggcagaggcagtaagactggaagaggaggaaggaagagctccctacccactggtccccaaagctccctggagccgccattaactttgaatgaatgagtcggccaagttcagcctgggtgctgggggaaggagcacagttttggggacccccagccctggtgatcccaaactccctggggctctggcttcctgtcatcctggaaatgggtgttggaggttaggactgggtggcctgatccagacgggcgtctctcctcccacagaaggtggcctctaaccgagtgccccagcatgtacccagtcccacccctggaaggccctacacctggctcccagacaccccccaacttgcaatcaccctagtccccctcaaggctcccctatgcagagctagaccccggaggaggtcgtttgaggggcaggcattgagttgctttgcaaagttgtctttcagctgatgcttacggggaggacagtccccaggcgtgcaaaggttgacagagcggctgaagtttgggacctaattttggggagggggtatagttaggaggtccggagggctgttgggggcgggggttggagcttcaccaaggtccttcccgtcttatggggcaagagggggagttcgaagaccagccgcatgccggggggttgcagggggcgccggggaatgtgggatctttaaatatgggcggggcttgcggggtcgtcgaaggcggtgccaacccgggctcggccaatcggcggcggctcccgcgtcgcaccgcccccttctctcccggcccgggcgggcgctcgccccccgccgggcccgtggactgggcggcgggggatgcgcctgccgccgccgcccccggccccgccgcccccgggccccgcgcccgctcgctgctgcccgccccgtccgcgaccccggctccggctcccgactgggggtccgcggccgcgcgggaccctctcccctccagccttgtccgcccgctcgggccgagccccgcaggtacagggtgggatgggtgagggtgcgggaggatccaggatctgcagctcagggagcccgaggagggaggcacgtctcggagggggacgcggtttggggcaggggccaagagggagggtctccgtgcggtccggagcctaggagacacaggaaaggtggggggaatgaatgcatgtacattgcccgagtgagtgaggatccacgcacccccatcctgggagggggagggtgcagggttcactttgggggagggcagagctgtgagtctccaaactgcatagatagggttggaggtcggggagctctcagggatggacagtgacccgcaatgacttgggaatgggagggaggtgacccaccactggcccctggatccaggggttggggcactcagggaggggtcaggaaaccgggtcttccatctctccccggacagaagtcccggacccagctcggggcactgcccctgctgttctggagggctggccagcagatgggagttcccgaggctggggtctgagcggtgaggctgatggagatgcatcagaatggagggcccccgagggaggcagcctccaggagagcaggctaattgcaccctgctggctgctggcaggctcctggcgggtggtgatggggggatcgggcgggtagccagcgccttgctgcactggctcctgggcggcccatgggacgggagggcaggcagtgtctgtctgccctgcagagctagggccctgtgattattgggggaggggaggggaagggaggggtgggggtggtggcgggaagggggatcctcggagaccttcctcaacctcagcagggacacccggactctggctgcgcccgctggggacccacaacaggcccacatgtcccagaagtttctgctgtgtgctgatctggttgtggtacccggaagcccctgggtgtgcatctggggagcaggggcggtctgccttggggattgaggggcagggagcaccttctcttggtccagttctgaagaacagaaatcaatggcatgaagctcttacagactgcaaagcatttgccatgcgagatcttactctgttctggacaccaaccctcgtagtgggggggtgggggggaggcaccatgaggaatctttacaaagcaggtggccaaggagtgggcagtaacttgctccctggcaggggtacctagggccccttctcagtggctgcctcaaccaacctgtcatttgtaaaaatgctcgctggagggccctgggggcctgactgggattctgtctcttcccatgtcctgttgggtggggaatctaaggagccatcagccctgctccctgctaccctcatcctctcctcaagagctctcatgggtccccccaggcacacgaggttcccccagaagtgtgtgtctccagggagggtgtggaagtgggtctctgctcatcccctgcaccccaggcttcagggaagggagctctcatgaccagacagagtagtaaaagtaaggcaatatcaaagaccttccaacccaaatacaccccgtaggatgtttgttgtttgttagagatgggatattgctagttgtccaggctggtctcgagctcctgggctgaagtgatctcctgccttggcctcttgaatagctggaactaggtatatacctagctaatagggtggtattcctcacttggcaaacccagggctgttacccagaaaaacataccctttcatgggcatccaaaccttggctgagggttcccaggggctcctgggtctctgggaatccctgagggtcccagggactccagtgttaggcccagattgcagtgggggaggggatgtgtacccaggaatggggaaggcccaggcactcatcagttctgtgctccaagctagtggcttctcgacggcaggaccaggccagttcccctcccagaaagcagaccctgccacctgccacgcctggatggcactaatttagtccctgcctttcctggctgggtgaccttgggcaaaaggtgctgagcttctctgagctctgtctcccgtctgtaaaatgggaacgggaatgccaccttgctcaccggtggtgatagggattaaatgtgatcaccctgatctcaggctcaaagcatagtaagagcccggtccacagtaatgtggtgggtgccgggaaagccctccacccctccacccctccaccctcttggaagccacctgccatttctctcctcctccccaccccctccctgcccagggcaccttaggacgcggctgccaggcgaggaggaacatggcagacacacggctgaatttggcccatgcgtcgggtggctgagtcacatccccaaattgcatcttcattggtgcgtttcggaaggtcgtttgcagaggccatcggaggcctacaccccctctgggttctgtctgccaggccacccgcttctcatccctgtgccccccatccccagctggggaagttttgcaccctcggggatggtggaaggggtgcctgggttttcctgggccccctggaggagggcaggatctggggttcctgtgtgcaccctagtgcaagctcccagccccacctggtagccagcggatgttcaggcagtgggcaggggtttgagcctcggagcagaaggcccacctaagtatttgtgaggttacggaaagatcagggccaaggtcagcctcataaactgtcaaatgctgggcccacaaggccaggccttatagactgtgaagtgctgggccggcaggaggtcaggcctgataaactgggaagtactaggccacatgaggctaggtctcataaactgggaagtgctgggcctgcgggaggtcaggccttacaagctgtgaggtgcctggtcacaggaagccacagcctgattgatgtgatgggtgagggtgggaaggggtgggacaagttctgagactcatgaggtcacctgaccatagaaggaatgatttttttttttttttttttttttttttttttttttttttttttttggagacagggtctcactctgttatccaggctggaatgcagtggcatgatctcagctcactgcaacctccacttcccgggttcaagtgattcttgtgcctcagcctcccaagtagctgggatgacaggtgcccactaccacgcccggctaattttgtatttttagtagagacagggtttcactatgttggccaggctggtcttgaactcttgacttcaggtgatccacccaccttggcctcccagagtgctgggattacaggtgtgagccaccacgcccagccagttttgccatgttggccaagctggtcttgaactcctgacctcaagtgatctacccgcctcagcctcccaaagtgctggaattacaggcatgagctaccgcgcccggccacaaagaaataattcttgcactcctgtgtgctgacaccagtatctggagacacatcgtgagggacagacacagtgtggggggtgccggacaaaggcataggtggtcctgcaatgtgtgcggcagccaaagtcacccatgtccaactcagcagtgtagctcatttttttttttttttgagacagagtctcactctgttgcccaggctggagtgcagtggcgtgatctcagctcactgcagcctccacctcccgagttcaagctattctcctgcctcagcctcccaagtagctgggattacaggtgcccaccaccacacctggctaatttttgtagttttagtagagacaggatttcgccatgttggccaggctggcctcaaactcctgacctcaagtgatctgcccacctcagcctcccaaagtgctgggattacaggcgtgagccactgcacccagccaatgtggctcatcttgctgtgtcctggaatgacgatctgctagtctgtcacccccagtgggggtgggaagtgtcctgcctgtgcacacagctgcccccaacccttctcccaggcctggcacatgggggacccctagtgcatgctgttgtgaccatttcaaaggggataacacttggcctccacccacccctgcccagcttgttgggaaaatctcacaaaggagccgggtccggaatcttccctgcaaggagaaggtgtgtcttcaggcaggtttgtattattattattttttttttgagacggagttttgctcttgttgcccaggctggagtgcaatggcatgatctcagctcactgcaacctccgcctcccgggttcaagcgattctcctgtctcaacctcctgagtaggtgggattacaggcatgggccaccacgcccagctaattttttgtctttttagtagagacggggtttcaccatgttggtcaggctggtctcgaactcctgacctcagatgatctgcccaccttggcctcccaaagtgctgggattccaggcgtgagccaccgtgcccggcccaggcagattctttcacaacatcatgccacagtttccccatctgtaaaactggccaaatcccaggacccacttcttggcagtattaggattcaggagaacatttacataaagaatggagcctgggaccgggcacagtggctcatgcctgtaatcccaacactttgggaggacgaggaggaaggatcactggagcccaggagttccagaccagcctgggcaatgtagcaaggcctgatctctactagaaataaaaataaatcatctatggccataccaccctgaacactcccgatctcatctgatctcggaaaaataaatcattagctgggggtggtggcgcatacctgtagtccttgctgcttgggaggctgaggtgggaggatcgcttgagcccaggagtccgaggctgcagtgagctaggattgccccactgcactccagcctgggctacagagcaggcaaggagtgcatttgagggtctgagatactgggctgggcagggcaggggagaatctgacaagttggatccagagtctcagacagcctctcaatgccttggtgagcatgatgactatgtcaccatcattgaggtccctgctctcacacatgatgccacaggacattgctctgtaatcacacagggtgcttttcaaatagcctggcagggaaacaggctagcctgagatcatagagcccagccaagcatgtcttatgtcttacaaagccctgcagaatcgattctagatcttggagttaaagcctgcattgccacactgtttggagatcatggatcccctcctggaaaccatttggattctgtttggaatctgtttggagattatggatcccctcctgcccaggcaggagggagcctcaggatctctgtagccacagccagggtccctaatgtcccataggccacagtgcaggagcctacaaatgcaggaggcacggtgaggtgaggttaactcatccaagagtctgaaggttggaagaggatgagctcagatgaaaaccaccttctaagcataccattagccaccctctcctcccaggcaagcccgttggtagatttcatcttccagcgttcagcaagtgtttcctgagtgtcatctgtttgctaggcattgttctaggtgcttggatacacataaagtcagcaggcagggctctggtaggggggcattccaggcagagggcacagcctgtgcaaggtatcagagaaggatgaacttgttggaatctggtgattgggagaccattgtggctggaggaattgggtctggggagagtaagaaggacgagataggtgggaaccagatacagagggccccttggccatagtgaagagtttggtgttttatttgtttttgtttttgttttttttagagatcggctctagttatgttgtccaggctggatttaaacccccagactcaagtgatcctccagtctcagcctctgagtagctgtgattacaagtgtgcaccactgggcccagctctggagtttctttgttctttttcttttttttgagacgtagtctcactctgccacccaggctggagtgcaatggcatgatcttggctcactacagcctctgcttcctgggttcaagcgattcttctgcctcagcctcccacgcagctgggactacaggcatgcaccactacgcctggctaatttttgtatttttagtagagactggttttcgccatgttggccaggccagtttcgaactcctgaactcaagcggtccttctgccttggcctcctaagtagctgcaattaccagagctgcaccaccatgcccggctctctggggttgattttttcagtgagatggcactggggagccatggcagggctttgagcaggggagggattcaggctgactcagatgtttctgggatggtaaacccacgtgtcagcactctgggccactcccaaacttagaacgttctgggttggccgggatggtccttgcctttctggtcagtaagctggaccctgctgtgaccatgtccctctgtgcccttgcaggtcagtgcaggagcccagccgctgagccatgccgggccccgggcggcctgcagcgagcccaacccctgcacccaggtagtcatgaacagccacagctacaatggcagcgtggggcggccgctgggcagcgggccgggcgccctgggacgagaccctccggaccctgaggccggccaccccccacaacccccgcacagcccgggcctccaggtggtagtggccaagagtgagccagcccggccctcacccggcagcccccgggggcagccccaggaccaggacgatgacgaggatgatgaggaagatgaggccggcaggcagagagcctcggggaaaccctcaaatgtgggccaccgcctgggccaccggcgggcgctcttcgagaagcggaagcgcctcagcgactatgccctcattttcggcatgtttggcatcgtcgtcatggtgacggagaccgagctgtcctggggggtgtacaccaaggtaggcgtggtcctcccccaggcactccagggaggttccaccaagcccgcctagctttcttgacatggggttgggggtggcagggccccccgggagatagggagtgttagggggctcccggaggtgagggctccctggccttctgcatacccacctccaggaaggtagcagggaggctacacatggagaaggaaggttccagcccattccctggccaggtgtcaaggggctgcaccctggcttaaggcggaggggggcttccccccaggacaggggttccccagagtgggcctgctctggggagcaacagaagatcttcctccccttccgagagtgagtgcgtccaggttacaagcctggctgtgggttccctcatgccacctagaatgtgtgaggatggagagagatcagggctgtgtcagcctgtaaactctgaagtgccgaggctggatgaggtccggccttgtgaactgtgaagtgctgtgcccaagtgaggccaggcctcataaactgtgaagcactggacacatcttgctgtcagcccagtccccaggaataaggacaggagagcaccgcttcctgaatacagcacatgctgcacgcccagccctgataagctgtttcacacacagcagccccaggactggggaactagcagaaattcagggtacagtgggagaagccactgggaagagccccatttagctgactcccatgcccgggagccagggtaaggggatgggagggccgccggcccaccgcctccagcgtccatctggctgtgtcctctctctttaccaggagtctctgtactcattcgcactcaaatgcctcatcagcctctccacggccatcctgctgggtctcgttgtcctctaccatgcccgggagatccaggtcagtgctgaatactgcaggaagcagctcctctcctcaaaccccagatccccccacaccagcccaccttagaccccatcccctcaaaacataaaaggatgtataattggcttctgatagaaaaaagatctccataaagacacacagtttccatcattctagatttccttgaaacacacatctgtgttttaattttcattgattatttacaaaaaagaacaggtagtgagaaagtgaggggctgagctgggactctgggacacacgggttgtttccaggctggagtgcagtggtgcgatattggctcgctgcaacctctgcctcctgggttcaagcgattcttctgcctcagtctcccgagtagctgggattacaggcgcatggcaccacaccttgctaatttttgtatttctagtagagacgggatttcaccatgttggccaggctggtctcgaactcctgacctccagtgatccacccgtctcagcctcccaaagtgctaggattacaggtgtcagccactgctcctggcctatttgtttagtttttgagacagggtctcactctgttgcccaggctggagtgcagtgatgcagtcatggctttgacctcttgtgttcaagagattttcctgccacagcctcccgagtagctgggactacagctgcgcaccaccacacctggctaatttttgtattgtcttgtcagtgtctcgccatattgcccaggctggcctcaaactcgtgggctcaagtgatcggcccacctcaccctcccaaagtgttgggactttacaggcatgagccaccatgcccggctgcacacgcatgttgataacagcactgttcaaagtagccaaaaatcacacctgtgatcccagcactttgggaggccaaggcgggtggatcacttggggtcaggagttcaagaccagcttggtcaacgtggtgaaactccatctctacaaaaattagccaggcatgatatcgggtgcacgtaatcccagctatttgggaggctgaggcgggagaatcacttgaacctgggaggcagaggttgcagtggagctgagatcgaaccattgcactccagcctgggcaacagagcaagactccgtctcaaaaaaacaaaaatacaaagtagccaaaaagcagaaacaacatccaaatgtccatccaggcatgaatggataaataaaatgtagtgcacctgtacaatggacaattattcaacctttttttttttttgagacggagtttcactgttgttgtccaggctggagtgcaatggcacgatctccagctcaccgcaacctacgcctcctgggttcaagcaattctcctgcttcagcctcccgagcagctgggattacaggcatgtgccaccacacccagctaattttgtatttttagtagagacggggtttctccatgttggtcagggtggtctcgaactcccaacctcaggtgatctgcccgcctcggcctcccaaggtgctgggattacaggtgtgagccaccgcgcccagcataacctttttttttttgagatggagtctcactctgttgcccaggctggagtgcagtggcgcgatcttggctcactgcaacctccgcctcccaggttcaagtgattctcctgcctcagtctcctgagtggctgggattacaggtgcccgccaccacgcctggctaatttttgtatttttagtacagatggggtttcaccatattggccaggctggtctcgaactcctgacctcagggtgatcctcccaccttggcctcccaaagtgctgggattacaagcgtgagccaccatgcctggcctattcaaccttaacaaaagaacgaaacaccaaaacagcagaaatgtattgtctgaaagtctggagtatagaagtctgagatcaaggcgttagcagggttggttccttctgagagccatgagagacaatccgtcccaggcctctctcctagcttttggttgctgctggcaattttgggggttctcagcttaggagatgtgtcactccaatctctgccttgaggatcacatgatgttctccctttgagagtgtctgtgtccaaatttcccctttttaaaataagaacaccagtcattattggattagggcccactgcaattagatgattccacttttttttttttgagacagagtttcactctgtcacccacactggaatgccgtggcttgatcacagatcactgcagcctcgacatcctgggcttacacagtcctcccacctcagcccccaggtagctgggattacaagcacttgccaccatgcccagctaatttttaaattttttgctttttttgtagaaagggggtcttaccatgttggccaggctggtcttgaactcctgggctgaagcgatcctcccacttcagcctcccaaagtgctgagatttcaggcgtgagccactatgcctggcctgattccagcttaacttcattttaactagccgacctcgttacaatgacctcatttaacgagatgacctctataaagaccttatctccatataagagcacattcagaggtactagaggtcaggatgccaacatatctttttcagcagaacacaaatcaacctataacaatttctgatactgaacatggatgaacctcagaaatacgacgctcagcagaagaacccagacataaaaggccacaaattgcatgcttccatttatgtgaaattttcagaagatgcaaatccgcagagacagaaaggagattagtggttgccgggggctgggaaaggagcgactgctaatggggacagggctcccttttggggtgatggaagtgttctgaaattagatagaagaggtgtactaaatcccactgaattgtgcactttaaatgggagaattatacggtttgtgaatttcatatatgtatacttgttttttttttttttttttgagatggcgtcttgctctgtcacccaggctggagtacagtggtgcaatctcagctcattgcaacctccgcctcctgggttcaagtcattctcctgcctcagcctcctgagtagctgggattacaggtacctgccaccacacctggccaatttttgtatttttcgtagagatggggtttcaccatgttggccaggctggtcttgaactcctgacctcgtgttccacccgcctcggccttccaaagtgctgggattacaggcatgagccactgcccagcctgttttttttttttttttttttaaacacaggatctcgttctgtcgcccaggctggagtacagtggtgcagtcagagttcactgcagcttgtacctcctgggatcaaggagtcctgcctcagccttccaagtagctgggaccacaggcacagaccgccatgcccagctaaatgtaaaaccttatatatacagatatataaaaccatacatatataaagacaggattttcctatgttgcccaggctggtctcaaactcctgggctagagtgatcctcctgcctcagcctcctaaagtgttgggattataggtgtgagccacagacccggcttttttttttaactgtaattcaggctggacacagtgactcacgcctgtaatcccaatactttggaaggccgaggcaggaggatcactcgagcacaggagttcgagatcagcctgggcaacgtggcgaaacaccgtctctacacaaaaattttttaaacagttagccaggcatggtggtacacatctgtagttccagctacttgggaggttgaggtgggaggatcacctgagcccagggaggtcaaggctgcagtgagccatgatggcgccactgcacaccagcctgggggacagaatgagactccctctcaaaacaaaaaacaaaacaaaacaaacaaacaacaaaatggaggcagtatggacagtaacatagcaagaccccttcctcttaaaaaaaaaaaaaaaaaaaggccgggctcacgactgtaatcccagcactttgggaggccgaggtgggcggatcacgaggtcaggagatggagaccatcctggctaacacggtgaaaccccgtctctactaaaaatacaaaacattagccaggcgtggtggcgggcgcctgtagtcccagctactcgggaggctgaggcaggagaatggcgtgaacccgggagtaggagcttgcagtgagccgagatcgcgtcactgcactccagcctgggcaatggagcgagactccgtctcaaaaaaaaaaaaaaaaaaaaaaggaaggagttagaggctccagtaagcagtaagctatgatcccgccagagcaggacccggtctcaaaaatagggtggggggtgggggagggggcgtggctgcattcctgatgataccttttgcctccagctccaatatgattggtcccggctccgtaactgacagatgttatgtatcttggcgctcccctcatctcccctaggactggccctggatatggccagggtaccccatggagggtgagcaatggcgctgtagggtgtcctttatgtcaacgctttgccgatgtgcgagcggaggaggcccctagaacgcgcggccgccacattttaaggaagtgacttttttttctttttcttattttagaatgactttattgcttcttatttttaaaatgacacgtgaaaaaggaaaaaaaaagatacttaagagttatacacacgttcagaaggaagagaaaagtacagtgaagggctgggcacccacacctggaatctcagcactttgggaggctgaggagggaggactgctggagcccaggagttcaaagccagcctgggcaacagagcgagtccccatctctgcattaattttctttttctttttctttctttttttttttttatcgagacaagagtctcactctgttgcccaggctggagtgcagtggcgcaatcttggctcactgcaacctctgcctcccaggttcaaatgattcttgtgcgtcagcctctcaaggctgagattacaggcacccgccaccacacctagctaatttttttttttttttttttttttttttttttgtatttttagtagagacggggttttgccatgttgcctgggctggtctcaaactgctggcctcaagcagtcctcctgcctcccaaagcactgggattacaggcaggagccactgcacccattctgtttccacttttggaggttgtgaatagtgccgttgtgaatgtgtctgtccaagcgtttgcttaaacacttgttttagtttctcttgagtctgtctaggagtgggattgctgggtcattagtaactctatgttgaactttttggggaacactcatatttcgttcgaactgtggccagtgctgagaactagagagttttgcatacgaggtcacgtttctgacttctcttggaaaaatttgaagctggtgcggttgctcacacctgtgattccagcactctgggaggctgaggcaggaggacacttgaggccaggagttttagaccagcctgggcaaaatagggagaccccatctctacaggaaatttaaaaaattagccaggcatggtgttgcatgcctgtaatcccagctcctcaggaggagactgaggcaggaggatcacttgagcccaggaggtcaagactgcagtgagctgtgattgcaccactgcactccagcccgggcacagagcaagaccttgtctccaaaaaaaggaaaaagaaaagaaaaatcctcgccaggcacagtggctcacacgtgtaatcccagcactttgggaggccgaggcatgtggatcacttgaagtcaggagtttgagaccagcctggccaacatggtgaaaccccgtatctactaaaaatacaaaaattagccaggcatggtggcaggcacctgtaatcccagctactcgggaggctgaggcaggagaattgcttgaacccgggaggcagaggttgccaagatcgtcttcatggtgcatgagccaagtgaaccaggattgcgccactgcactacagcctgtgcgacagagtgagaccctgtctcaagaaaaagaaaaagaaagaaaagaggctgggcatggtggcttacgcctgtaatccctgcactttgggaggccgaggtgggcagatcacctgaggtcaggaattcgagactagcctggccaacatgatgaaaccccatctctactaaaaatacaaaaattagccaggtgtggtggggcaagcctgtaattccagctactccggaggctgaggcaagagaattgctttcacccaggaggcggagattgcagtgagcagagatcgtgccactgcactccagcctgggcgataagagcaaaactccatctcaaaaaaaaaaaaaaaagaaagaaagaaagaaagaaaaatccgagcctgtggggtttcaggccaggctgacgtcactctctgggggcgcggtggggctgggcagggagcgcggcgcgtgtctgacacccatggctggttccctcccgccctccacagctgttcatggtggacaacggggctgatgactggcgcatcgccatgacctgcgagcgcgtgttcctcatctcgctagagctggcagtgtgcgccattcacccggtgcccggccactaccgcttcacgtggacggcgcggctggccttcacgtacgcgccctcggtggccgaggccgacgtggacgtgctgctgtccatccccatgttcctgcgcctctacctgctgggccgggtgatgctactgcacagcaaaatcttcacggacgcctcgagccgcagcatcggggccctcaacaagatcaccttcaacacgcgcttcgtcatgaagacactcatgaccatctgccccggcaccgtgctgctggtcttcagcatctcctcctggatcatcgcagcctggaccgtgcgcgtctgcgagaggtgcgaccgccgcccctggagcccccccagcccccagcccccgtctccctggacctccatgcccattcatgatttcaccgaccctgggcccctcccgaccctggccattgcttctgtctccccgactgcaagacacccgtggtgcctcctgtcttccagtttgtggcttcagtaatcatcctccctggggacctaaccctgtgtccccagctgccctcaaccagggagggaccccagctccctctccctcatcctccctgccagggtctcccaagcttccttctcccagcccctcggctccctgggaggctgactcccgatctctggccccggggggcgcaggcagcaggcacagggatgcctccccgtcccctctgtctcccatctcccacgtttaaccagctttcattttcccctctgcccgctccactggactttagggaaaacatgtgagtcccaccctccgctgagctgtgtgcgcagagcagccactgccaccgctgccgccatccccgacccgctaggaatttaagattagctgccgcaaggggagggaggcagggagaacgggcccggcggggtgggtcggggtaagtcaccccgtcacgggggcaggccactccactgggcgtcctctccgagcctcagggcccttgtgtccgaagggtgagggattaaggaagggcttggctctcatgttgtgtttgggcagctgacccctgggagctccgatgtttcctcccaagacttaaatggatctggggtgggctaggtgcggtggtggtgcctgtgatcccagctactcgggagcctgaggcaggagaatcgcttgaacctgggacgcggaggttgcagtgagctgagattgcgccactgcactccagtcaaaaaaaaaaaagacaaataaatgggtctgggatgaaggaaaaccggccgtgcctttgggacctccaagcaggagggagtctgttgtaaatacccctaggaggtggtggaccatcaacccgatttacagagagggaaactgaggctctgggggacaaagggacttgcccggagccttgagtcctggcagtctcagaggcaggaggggctccgccaggcctggggtgtgagggtgccttatctgggagagggtctccctgccatgcgcctagctggtggaggccctggaggggtccctggctggacccctgcttgccctcagcaccccatcctcatccctccacccagcccccaccccccatactcccacgggccctgcctgggcatgaggcctggctctcagggatgaaaggcccagtttctctggctgttaaggcttccagggctctccttgggctcttgatgttcccccatgcagctctcacacccctgatgggtggggtcagaactagggttaggggtatggggtgcccctcgtcaggtatccctgaggtccaagctgggtccttgcagggctctgggggggtggggcacggggcagggccggcaggcagccaatcctaaattctgagcctggcgacaatgcttgaagcccccttgcctgcctcgctctgacccacccccgcctcccgcatgtcccccagccgtgctcctgggtggtcccgcggcaccccccaccatcgctccgtctggatctggggctcacccacccaccgactagagggcacccccccgcccctcctgccctctgggggtcaggcagcttggggctcagatgttttggtgtaagatgggggtcagtcagctgggcaccgtggctcatgcctgtaatcccagcactttgggaggccgaggcgggtggattaccaggtcaggagattgagaccatcctggctaacatggtgaaaccctgtctctactaaaaatacaaaaaaaaaaaattagatgggcatggtggcgggcgcgtgtagtcccagctactcgggaggctgaagcaggagaatcgcttgaacccgggaggtgtaggttgcagtgagccaagatcatgccactacactccagcctgggcaacagagagagatattgtctcaaaaaaaaaaaaagatagggtcagtccctgggcctttacccagcaagtgtcctagaagcccagactggaggtgcctggagtggcattcgacttccgcgggagtgaagacccccaaatgccaatatttggggagcccccatctccttccctctggagcctgaccccagccctatccttgggctgtgtcacccactgtgcctggcacaggcctcccctgaagatcctgctctatccaggccacttcctcggtgctaccccagttggcctctgaccttgaacaccccagaggctggcttggggctcaggtgatctaagccctgggaaggagtgggttagctggaagccaggtcagagggggcccagtctccagaaaaaggccaaggggatttggggactgagagctgagtgggaacagatcctagagccacccccagacccagagagccaagccctcggcccgctagcatggccacaggcagaacctctttgcagcccctctggccgaagtcccaagcctggctgtgaccaggactaagttctgtcagtcttggggcctgtctccctgggtcccaaatatagccccaggcatctccccagtgccaaagccgatgcccctctcttcccaacccccagatgcaacataggctgagttgggggactcatgctgtcctccagtctatgtccttcctatatggacgtcccttcttcactcgagccccaggtggtgatcctccagcctcccacctcctccagtcctcctccctccttggggccttgctggctgagaaagttcttcctggtgtctgtcctgaattcttgcctccacctcctgctgcttctggtgctgtggtcacccatccccctgtctgtgtgtgtctgtcgttgggagggggattgtatgttcatacaacctcacctgggcccctctctgccccatccagggaagcagcttgggggggcaggcaaagggaatgtggaagggctgtagcgggggagagggtgcgcctgtcctgtacccacaggacatagccccaacgcagcgaggtggactcagggccctccagccctggcgctgccccagggggtgtgatggaggcaaaggggatggtatagactgagccctccctcttcccactctggctcccccaggtaccacgacaagcaggaagtgaccagcaacttcctgggggccatgtggctgatttccatcaccttcctctccattggctacggcgacatggtgccccacacctactgcgggaagggtgtgtgcctgctcactggcatcatggtaagggtgagggtccatgtgtatgatcctgggaggtccagccagctgcccgctccaccagcccttgcataccccttgctgacagggtgctcatcccatcacgagctgtgcctgatcagcgtccctccatctgtcagtccacccctcccctgctctgctcttttcctctgacgtcacgtggaagccacacccacaggcttcctgggacatctccatgcggtccttccaggcctagatatgcagctcccaccatgcctgcccagtaagaagctgcggtccactctgaccagagagtcactgtcacccctttattctctacagcctgatttattcacagcctttggatccagggcaaggggcttgatgctgatgtgccttagtttcctcagctgtgaccagcgctacttcctctgctttgcaagggctaagtcggttatttatgtgagaatcccagaactgtgaatgccatggacatgctataactacctgctgggggccgggcgtggtggctcatgcctgtaatcccagcactttgggaggccaaggtgggcagatcacctgaggttgggagtttgagatcagcctgtgaccaacatggagaaaccctgtctctactaaaaatacaaaaatagccgggagtggtggctcacacctgtaatcccagtactttgggaggccaaggcgggtggatcacgaggtcaggagttcaagaccagcctggccaacgtggtgagacccagtctgtactaaaaatacaaaattagccgggcgtggtggtgggtgcctgtaatcccagctactagggaggctgaggcatgagaattgcttgaacccaggaggcagaggttgtggtgagcggagatcacgtcattgcactccagcctgggcaaccagagtgaactaagtctcaaaaaaaaaaaaaagaaaaaagaaacctgctgggctgtgtcctctgcagcccaaactcccttccttagctgactttcggggtgttccctgagtttttcgtgacagtgggcgcaggcagcaccccgtctccccgaaggattctcaagtctgccgtgggtgcctgtgaacatcctttcacactcactgctttctcttttccctaattcagtcatcggggtccctgtccatcccctctttccagagccttctttctctccagacatgttttatgcccatgccaacaaacgcttttccatgttttatttttatgtttttataaagatggggtctcactatgttgcccaggctggtcatgaactcctgggctcaagtgatcctcctgcttgggcctcccaaggtgctggagttacaggcctaagcaactgcacctggcccatgcctgactttgtttttttcctcattgagatggagtctcactctgttgcccagcctggagtgcaacggcacgatcccagctcactgcaacctccgcctcccgggttcaagccattctcctgcctcagcttcctgagtagctggaattacaggcgcctgccaccaggctcggctaatttttctatttttagtatagacagggtttcatcatgctggccagtctggtcttgaactcccaacctcagataatccacctgcctcagcctcccaaggtgctgggattacaggcatgacgccaccacgctggccctttttttcttttttttttttgagatagagtctcgctctgtcgcccaggctggaatgcagtggcgtgatctcagctcactgcaaccttcccctcccaggttcaagcgattctcctgcttcagcctcctgagtagctgggatggcaggcacctgccaccaggcccagctaatttttgtatttttagtacagacagggtttcaccatgtcgaccaggctggtctcgaactcttgacctcaggtgatccacccaccttggcctcccaaagtgctgggattacaggtgcaagccactgcacctggtccgtgtctgcttttttgctggcagcccagcatgggtccctccctgtagcatctgtgtggtgcatcatgctgttgcagagccgttgtccattccttttccttgctgtctagtattctaggtggaggtttccagcaagtcactctgtcccagttgacagggattttcctgagaacaggcttctgggtcctctcaaaacctttgtcctggcctggaaaccgagacagggtttcctccgggagcccctgcttgtgctctaggccaaccctgctcaggctcagggtgttggcatctaaacctgcctggggctgggcatggtaatggctcatgcctgtaatcccagcactttgggaggccgaggtgggtggatcatttgaggccaggtgtccgagaccagcctgggcaacatagtgagaccccatatcgctaccaaaaaaaaaaaaaaaaaaaaacagggccaggcgcagtggcttacacctgtactcccagcactttgggaggccaaggcgggtggatcacctgtcaggagttcgagaccagcctgaccaacatggtgaaaccccccctttactaaacaaacacacacacacacacacacaattagcgggatgtggtggtgcacgcttctagttccagctactcaggaggctgaggcaggagaatcgcttgaacctgggaagtggaggttgcagtcagctgagattgtgccactgcactccagcctgggcgacagagcgagactccatctcaaaaaaaaaaaaaaaaaaaaaaagaatcgtcctacctcctggagttgttgggggtcgaatgagctaatgtgtgggacatggttccctctgacatttgatgaataggaaacgagtagacctgaagtcagtgagctcagcagatggaatccactcacactgctggctcagagaatggggaggctgcaatctgggcaggcttcctggaggagggagtgacctcaagacaggacgctgatgtgccccctctgccctgcacacagggagctggctgtaccgcgctcgtggtggctgtggtggctcggaagctggagctcaccaaggctgagaagcacgtgcacaacttcatgatggacactcagctcaccaagcgggtgaggaccgcggttcccatggaggccgcctcctggccttgtcagcgagcgtagaacttccctgctttccctctgtacgtgccgggcatgctcatgtgcccatgggttaccatgcagccccgtgtcaagactgtgctggctttgggaggccaaggcaggtggatcacctaaggccaggagttcgagaccagcctggccaacatggcaaaatcccatctctactaaaaatacaaaaattagcctggcatggtgacggacgcctgtagtcccatccacttgggagtctgaggcaggagaatcgcttgagcctgggaagcagaggctgcaataagccaagatggcaccactgcactcgaacctgggtgacagagcaagactccgtttaaaaaaaaaaaaaaaaggactgtgcttggctctgccaccacgcacccatctgtgagtaatgcacagagagacatcgtggcatcaacccttgtgcccagtcacgtccagccatgagcattcagtaagaggcttgagccagaccgccatatgcaatttgagagctgcctgaccctagcgggttgactgctctgtacctcagcttccccatatagaaaatcagggaaataaaaacacatgccgattcactgagttaacatctgcatcatggccgggcgcggtggctcacgcctgtaatcccagcactttaggaggccgaggcgggcggatcacttgaggtcaggagttcaaaaccagcctggccaacgtgatgaaaccccatctctagtaaaaatacaaaaattagctgagcgtgatcgcaggcgcctgtaatcccagctactagggagagtgaggcagaagaatcacttgaacctgagaggtggaggtcgcagtgaggcaagatcatgccactgcattccagtctgggccacagagcctcaaaaaacaaacaaacaaacaaacaaacaaaaaacattaaaaacatttgcatggtgcatagaaggggcctggcccatcatgagtgatgtgtgttaggtatacacacactgcacagatgttgttgtacaagcatggccctgccttatagcccagggaccctgagaggcatttccagaagtttctagaggtttctggaagattctagacatttctggagccttttggaatttcgcgccaaccctgaggaattgttctttttctggccccaggtaaaaaacgccgctgctaacgttctcagggagacgtggctcatctacaaacataccaggctggtgaagaagccagaccaagcccgggttcggaaacaccagcgtaagttcctccaagccatccatcagtaagtccagcacctttccagctcacgtttctgtgtccacatggcgcggaggcagccctcgcagctctgtgtggcctcttcacggctccctgccagggacgggtggtcagttggttggggcctgcatcttctgagctgggtggatgggaggatcttcagagggaggcagatgatggggtctgctaaatcatggacacgactcagtaagtggcaggatgtatattttattctctggaataaccaggataattcttaccctttagactttgaagcgatttcctctttttgctttgtctgccaggaggctcatagttaaatccatggtctgatccatgggatcatgtaggataactagaaatgaattgggccaggtgcggtggctcatgcctgtaatcccagcactttgggaggcaggaagatcgcttgagtccaggagttcaacaccatccgtggcaatacagggagaccccatctctacaaaaactaagaacttaactgggtgtggtggtgtgcctctgtggtcccagatactcgggaggctgaggtggaaggatcacttgagtctgcagggtcaaggctgcagtgagccatgattgcgccactgcactcagctgggttacaaagtgagaccttgtctcaaaaaaaaaaaaagaaagaaaagaaaaagaaaaaaaaggccgggcgcggtggctcacgcctgtaatcccagcactttgggaggccgaggtgggtggatcacgaggtcaggagatcaagaccatcctggctaacacagtgaaacctcgtctctactaaaaatacaaaaaattagccgggcgtggtggcggacgcctgtagtcccagctactcgggaggctgaggcaggagaatggcatgaacccaggaggcggagctcgcagtaagctgagattgcgccgctgcactccagcctgggcgacagagtgagactctgtctcaaaaaaaaaaaaaaagaaagaaaaagaaaaaaaagaagaaagaaattgcttgattccctatgttgtttctttgccctgagaactatttaataaagtagctctaaatccttggctgctcattgaagtcaccagggggctttttaaaaatcccaagagccacatccaacatcagttacttagtagagtctgggttgcagtctgggtttacatttaaattcctcaaatgactgcttggttgggcatggtggctcacacttataatccctgcactttgggaggccaaggagggaagactgattgaggccaagatttggaaaccagcctgggaaacatagtgagaccccactctatgtaaaaattaaaaaataaagcgaggcgtggtgactcacacctcgtaatcccagcactttgggaggctgagccaggaggatcgcttgaggccaggagtttgcaaccagcctgggcaacaaagtgagaccccgtctctacaaaaataaaaaaattagcccagtgtggtggcatgtgtctatggtcccagctacccaggaggttgaggtgggaggataacttgagcccagaaggtcaaggttgcagcgagctgtgattgcgccactgcactccagcctgggccacagagcaaggccttgccttaaaaaactatatatggctgggtgcagtggctcacgcctgtaatcccagcactttgagaggccgaggcaggtggatcccctgatgtcagcctggccaacatggcgaaaccttgtctctactaaaaatataaaaattagccgggcatggtggcacgtgcctgtaggttgtactgagctgagatcgcaccactgcactccagcctgggcgacagagtaagactcagtctcaaaaaatcaaaaataaaatatattaaaataagtaaataaataaaatttcctcagttgagtccaatatgcagccagtcagcaaactttttctgtaaagggccagatggtaaatctttcaggttttatgggccagaccgtttctgtcccactcttcaactctctgctgctgaggcagggaagcagtgaggataacctggtgtggccatgttccaaagaaaccttattttccaagacaggcggccggctagatttgacccacaggccataatatgctgacgacaatgctgtccactagaatatcacgtgagcaacatatataattttaaatttgctaacagccacattagaaaaaagtacaaaaggctgggcgcggtggctcacacttgtaatcccagcactttgggaggccgagatgggtggatcatttgaggtcaggagttcaagaccagcctgaccaacatggtgaaaccccatctctactaaaaatacaaaaaaattagctgagcgtggtggcacatgcctgtagtcccagctactcggaaggctgaggcaggagaatcacgtgaacctgggaagctgaagttgcaatgagccaagatcactttgagacagtcccctggactggcttaggtacagaagggagtgccagcaggtgcagtggctcatgcctgtaatccttttggaggctgagacgggcggatcacatgaggtcaggagttcgagaccagcctgaccaacatggtgaaaccccatctctactaaaaatacaaaaattaaaccaggtgtgctggtgagcgcttgtaattccagctactcagaaggctgagccaggagaatcgcttgaaccggggaagtggaggttgcagtgagctgagaccatgccactgcactcccgcctgggtgacagagtgagactccgtctcaaaaaaaacaaagggatggtcaaaaggggcgagggcatacactaaccaactccccctgcggccagctgtccagagaccagggtcaccagtgccaacaccaacaccaagtagcaagtgtgggttcaaatcctgccggggtgcggatgggcagtggctttacccctctgagcctcagtttccccctcaggagatggtgtcggcatagttttctgaatgaaacaccgcctccggtggtggtgagaggacaggtgtgcccctgaggggctggcacagaaccctcagaggctgggcacctccccagagcaacggcagcccctcggccatctgggaaccccgcgcggggccctagggtggcatccccgggaggtgggcagggttgggtacatgccgaacaactgtgctgaggttaaaattgccttgtgatttttctcctgctctgcccggtcctgccagggctcagaagtaagtgttctcccaggggcttggtggggctgggaaatcgggggtgcatggtggtcacagacagggggtacacccggggcatgccaaccccagcctcagaggcgggcagggttcacatctgccccatggatccgtgcaggcttcaccttggtctgggatccaacttcctggggcagtcctgagttgggccggagacaggaccagccaatgggtggtgtgggcggtggccaggctgacttctggccctggcgcaccggctgtgtactgggagggaatagactacagggaatcggcctcccaactcccacctcatcctctgatgcatgtcccataggtgaccccgggtgggtgcatgaaagtccctgcccccactgcagcctccacgggaacctgcctaaccccctcccccaaccccgtgtccccacaggctccggagtgtgaagatcgagcaagggaagctgaacgaccaggctaacacgcttaccgacctagccaaggtgagtgggttggggcagggtgggccagacagggcaggtggggccccggagcagatgggatggggctcagctcctgccggaggagggcacaaggacccgctgtgggctgagtgcagtggcgggcggatcgcttgagctcaggagtttgagaccagcctgggcaacatggtgaaatcccgtctctacaaaaaaaatacaacaattagccaggcgtggtggcgggcgcctttaatcccagctacttgggggctgagggaggagaatcgcttgaacttggggggttgaggctgcagtgagccgagatggcaccactgcagtccagcctgggtgacagagtgacaccctgtctcaaaaaaatgataataattttaaaaataatttaaaaatttaaaaagagtacacaattagggggctaaatgggtgaagaggtatttctagatttaggcataccacctcaattcaagatctgaaatggaagagaaaaaattcctttgctatgggtataaattcaaatgatagccttgggagaaagctttgtataatttgtatagcaattaaacatctgtcaggaaatttaaattgattgcaagagaaattggggccagctgggttcaatgggtcatgcctataatccctgtactttgggaggctgaggcaggcagatcacttgagcccaagaggttgagaccagcctgggcagcacagagagaccccatctgtacaaaaagaataaaaaaattaaccaggcatggtggtgagtgcctgtagtcccagctattagggaggctgaggcgggagaatcacttgagcccaggaggtcaaggctgctgtgaggtatgatcactctgctgcactctagcctgggcaacagagcgagaccctgtctcaaaaaaaaaaaaaaagcaagaaagaaatcagtttgtgttatacatggatctgtgtgttgattcgaatatcaagtcatctcccacttttttttttagctttatttatttattttttgagacagagtcttgctctgtcacccaggctggagtgcagtggcgtgatctcagctcactgcaacttccgcctcccgggttcaagcaattctcgtgcttcagcctccagagtagctgggattacaggcatgcaccagcatgcccggctaatttttgtacttttagtagagacggggtttcgccatgttggccagcctggtctcgaactcctgaccttaagtgatccacccccctcagcctcccaaagtgttgggattacaggcgtgggccaccgtgcccagcccatttcccactttttgaattcttccactggaagatgtgtcactggaccagttgcaattaatcaagtgcttgagatctttgcaacactgatttgaattcccttctgaccaatgacatagtttcagaaaatagcttttgctcagtggctacatcccctgatctatcagtcagcttgaggctaatttcatgttatctttagaaaatgttaagtcccattctattttatttcttgtccccagtgcattttggactcacttcctccatcactaggaagagaatgcaatctagcttaatattaacctacaagaaatttaatttggaagggaatcttcttttttttttttttctgagacagggtcttgctctgtggtacaggctggagtgcagtggcaaaatcatggctcaccgcagcctcaacctccccaggctcaagcaatccccccaactcatcctcttgagtagctgggactacaggcgcacaccaccaggtcctgctaatttttgtattttttgtagagatggggtttcaccatgttgcccaggctggtctcaaactcctgagctcaagtgatcctcccgccttggcctcccaaagtgctgggattacaggcgtgagccaccgcacccagaaaagaatcttacagagagaaaaacatattctagacccctgaagatatacagttaactctcgaacatgggggttatggggtgctgaccccttaaaagtcaaatattcccatataacttctttttttctttttgagacagagtctcactctgttgcccaggctggagtgcagaggtgcgatctcagctcactgcagcctccatctcctaggtttaaggtattctcctgcctcagcctcctgagtagctaggattacaggtgtatgccgccacgcctagctactttttgtatttttagtagagatggggtttcaccatgttggccaggctggtctcgaactcctgacttcaagtaatccacctgccttggcctcccaaagtgctgggattacaggcataagccactgtgcccggcctcatataagttttgacgccccctcaccccaaatttaactactgatagcctaccattgaccaaaagccttactgataaacagttgattcacatatattttgtgtatatatactgtattcttacagtaaggtatggtagagaaaggaaaatattaagaaaatcaggccagatgcagtggctcatgcctgtaatcctagcactttgggaagttgaggaggggggatcacttgagctcaggaattcaagaccagcctgggcaacatggcaaaactccattgctacaaaaaaaaaaaaaaaaaaatagaaaaattagcaggaggctgaggtgggaggatcacttgagcctgggaggtaaaagctgcagtcagctgtgactgtaccactgcactccagtctgggagacagagcaagactctgtctctaaaaaataaaattttaagcctgggtgtagtggctcatccctgtaatcccagcaccttgggaggcaaaggtgggcggatcacctgaggccaggagttcaagaccagcctggccaacatggtgaaactttgtctccactaaaaatacaaaaattagccgggtgtggtagcgggcacctgtaatctcagctacttgggaggctgaggcaggagagtcgcttgaacccaggaggtggaggttgcagtgagccgagatcatgcctctgcactccagcctagacaacaagagcgagacttcgtctcaaaaataaaaataaaaataaaaattttaaacctcagaaaagactaaaaagaaccacctgaaggctggacactgctctggcctccagatgtcaccctctggctctagggactgtggtgcctgagagaggccagggtaaggtcagtggtgctaggaggggaggcccccacaaggtgtttgcactcggagtggggtctgccttgcactgatggagggaaaagggtagggggcacagtggaggaagctgggaggaagaggctgggtgtgagaggacagaggagctggggtgggcacctcgtcctgtcctgtcttccttccaccactgcctccatcctcccacggaggccgccgcggggtggcaaaccggtgtcctgacccagctgcgctcagagccgtggagtgatgttctagtgccacctggtggccagagtggtgtctgcacccaggactgtccctgcctggccggcctcccctgcccatagggggacagtgccagaaccgggcagttgaggtggtagggatgccccactggctgctgtaacagtaattgtggctgtcgtgttcccagtctgtgattgcgtcagattctcagggcagtcaccttcgtcattagacccctgtcccctccccagcctaatgggaggggtggcagttcacgactgaacagggtcccccctcctcttcttcctaggcagccatgtccccacgctcctgctgttccccagcctggagcaacgtcagccccaaacatcccccaggtctgtgggtaccacttgagcactgcctgtggctatgtgtgccctgtggccactagacccccagggcagctctgggcatgtccccccaccccagaacctcactaggcctttcccaggcctgccagccctgagcttggcttgcttgctttctttttcttgagacggattttccctcttgtcactcaggcgcactgaaacctccacctcctgggttcaagtgattctcctgcctcatcccccccgagtagcggggattacaggtgcccgctaccacatccggctaatttttgtatttttagtggagacaaagtttcaccatgttggccaggctggtctcaaactcctgacctcaggcgattcgcctgcctcggcctcccaaagtgctgggattacaggcgtgagccaccacaaccagctgagcttggcatttaagacctgtcttttaggctgggcgcctcccggaaagaggaggttgtaatgagccgagattgggccactgcactccagcataggtgacggagggagtctctgtctcaaagaaaaaaaaaaaaaagagagaaagaaaagaccagtctctcccctcatccactctccaatccttccctgggcccagcaagggacctctggggctgggggtatcctcccagccacccctcacacgggccccattagtggctggcacccacctggagcgtgtgggctgtccctctctgtcattggtgtcgtggtatcgtcctttcctctctcactcagcggcgcctctctcctgcccctctctgtctcccgcagacccagaccgtcatgtacgaccttgtatcggagctgcacgctcagcacgaggagctggaggcccgcctggccaccctggaaagccgcttggatgcgctgggtgcctctctacaggccctgcctggcctcatcgcccaagccatacgcccacccccgcctcccctgcctcccaggcccggccccggcccccaagaccaggcagcccggagctccccctgccggtggacgcccgtggccccctcggactgcgggtgacggccctgcccgccaccagacccctaaatcttggccatcgtgtggccgccacctccgggaagccttgtacagtggcgcctcttggagttcaagaagccaacgctgagtcaggctgagtggactgaggcctgccccgcccagactgcccaggcagagggcagggctggaccatgggtgagggcaggggagcccggagcttcctctggtcacctggtcccccgactctccccaggcccccggtgggcatggagcagcccggggaggggtccgtgctggttctgaataaagcaggacccgcctagtggctgcctgtgtgcatggctggaaggcactggtgatgtcccaggaggtagacctccagccctgggtaccaagatgaatgtgggaatcagaaaaacctgttcccatcaccggcctagcctagaatcctagcctagaagccctctctccctctgggctggagctcagtgagggacaactctctagggacacctgtaccagccccacctggcgctgagatccctcagacagcatggcccagccctggccagaagcatcgctccccttcaaccaaccgcgttgatggacacccactgtgtgccaggccccagcggggcccatgggggaggtgacctgggtgaggaaggtcatttgggtttttgtgagatttgtattgagcacctgctgtctacagagaatgtgatgatgtcaattaccacactgattcctcatcagaacttgaccatggtgggatgggggggaaactgaggcccagagaggtgaatctacctacctgggaccacactgcgaggaaggatggtgcattcaaactggaaatcccctaggccaaagtaaagaaccggactggctgggcacagtggctcacacctgtaatcccagcactttgggagggtaaagcgggcggatcacctgaggtcaggagttcaagaccagcctgggcaacatggtgaaaccctgtctctactaaaaatataaaaattagctgggtgtggtggtgcacgcctgtaatcccagctacttgggaggctgaggcaggataatcgcttgaacccaggaggtggaggttgcagtgagaaaaaacctggacttggtggaagggactccatggaggagccatggggacgtcaggaggaggggttatttggtgacatccaggggtcagagagacccttcaggggtgggctacaggggagggttccagacacaagtagaatcagaaaggtccctggaggccatgggcttgggtgctgggagcaacaggcatttacttggcagatgctgagccctgggtggggcgaggaggcctggctcctggggagacgacgctgtgcatagccgaggagccccaggtcctggcagcctctgataaggccatccatcgcctggctcaacgagataactaggccgtggctggtgcatgaatgaccagcttgggcccacgcacgagaagggtatgaggaggtgctggtcagacccgggttcgagtcctgactctgccactgctgggtgactctgagcagtggctgcccctctggggccttggttgtttcatctgtaaaatggggtgacagtctatttaaccagaactccctaaaaagggccaggcaactggtaggtgctcaataaatgctccttcccgcctgagggatcacactggagtctttggcaggactcatcctttctaccctgttgtctggctggggaaactaaggcctgagaaggaaaggggctgtccttcagggtgagaacccagggtttggttaaggaacatccgtgggtgtaccttctgtgccagtggtagctcccaggtctgatggcagaggcacagtaaacccatagtacttaaaaaaaaaaaaaaaaaaacaccaaagccataaagttatgaacaggccgggcgtggtggctcacgcctgtaatcccagtacttcgggaggctgaggtgggaggatcacctgaggtcaggagttggagaccagccggccaacatggtgaaaccctatctctactaaaaatacaaaaattagctgggcgtggacgactcctgtcgtcccaggtactcaggagactgaggcaggagaattgctagaaccagggaggtggagattgcagtgagccaggatcacgctactgtgccccggcctgggcgacagagcgagactctgtcttaaaaaaagagagagagaaagagaaaagtaaacaaggcaagaaagaaagagaaaaaaagaaagagaggaaggagggaaggaaggaaggaaggaaagaaagaaaaaacagagaaaagtaaacaaggccagaggtggcaaggggactctgaggaagtggcatttgggcgtgggcgggatgggtgggagaacggatctggtagcggaacggcccagtgcggaggcgaagagagctactcgaggtggattttgtttgagggacagccatgaagtgacaatgacggggagactgaggcggtgccgggttctgggcggcggggggggcaggggtagtgaggggcgaatgagaccatagggctgagatctgcggccgcctcggtgcctccccagccacctccgcccctgcctgcttctgattcaacagcgccgaccctacaaaaacagggcccgcccatctccgaggatggcaaagtcaacagtgcgggcacgcgggcggccagtccccggcggcccgcgtgcgtcacgggggcggatgcagaggaccaggaagttcgccgacgacgcgcccgccctgggccaccggcgccggcccaagttcgccgggggggcccggaggaagcttgggggacgcgacgggggaacgcggaaaccccggggatctgcaggcgcgcccgggccgtgtgccttctctccgcgtgtccaaaccgtgtccccagccgcgcgccatgcgctctgggggcgtgcgcagcttcgcgctggagctggcgcggggcccgggcggcgcctaccgcggcggggagcggctgtgcggccgggtgctgctggaggcggcggcgccgctgcgggtgcgagcgctcgaggtgaaggcgcgcggcggggcggccacccactggttggagggtcgcagcgtgggcgtcaacgccgtatccagcgactacgcggccgcggagacctacctgcggcgtcggcagctgctgctccgaggtgagacactcgtcgcgccgcccccgcagcagccgggaccccctcggccgcgaccctcttcagggccggaagcctctcaacttagaacctatgcggtcgggtgatccttttcaaggagggggaaacccccttcccggggtcctgaccctcccacaggtcaggagttcaagactagcctgggcgacatggtgaaaccccatgtctccaaaaactacaaaaattagccaggcttagtggcgcgcgcctggagtcccagctacaggctgaagtgggaagatcgcttgagcctgggaggtagaggttgtaatgggctgagatcgcaccactgcactccagcctggacacccaccccgccctggtcaggacccccactaaccgggaacgtctacccagggtctgggtgttcccttctctggagccagactccctcaacttagactgtgcggtggggagacccctttcaaagcagggggaccctcctattagagtccaggaaacccgcgggaagtagagtgggagatctccctggtggaccccagtgtccccgttgatcccaggcctggagtccctgattctcagagaaggcccccaactcgtgttacccagggccccacctcagtttaccccacagggtctgcagcgctgagttcttccctggggtagggttgggggtctggtggtatttcccggtgaggaggtggaaatgcatcccagaggggaagagatgaagtggggtcacattctcctgggagtctgggtcttgggcaggtccctactcttccccgaacctcagtccttctcgcaccccaagcgcccctaggccacgcagctggtcaccagcgagccaggggtcacagaaggaggcagtccataccctcacaccctactgtgtggctgcgggagggcatcatcctctctgggccgccctggctattcctccgggccaagccagacctcactatacccgtctgtaaaatgggccgggagggaggcagctcagattctcgacagccccacttttttcccagcgctgcgggcaatagaagttttgggcacacaagagccacaggtgcgggggacccttccctccccagcggtggaaacagaagcaagtgcggtggggcagggcaggaaggggcccaggaggcacttcccttccccggcgactcggagaactcttgggaccgctttcacccgaaggccggcccagacactcaacggcgacttccttaaaacactggagaggcagccgggtgcggtggctcacgcctgtaatcccagcactttgggaggctgaggcgggcagatcacctgaggtcaggagttcgagaccagcctggccaacatggtgaaactttgtctccactaaaaatacaaaaattagctgggcgtgctggtgggcgcctgaaatcccagcaactcgggaggctgaggcagaattgcttgaacccggcaggcggagattgcagtgagctgagatggcaccactacactccagcctgggcaacagagcgaaactccgtctcaaaaacaaaaacaaaaacaaataaacaaaaaacactggagaggcgagcctggtgggtccacctgtggtcccagctatcacagaggctgaagcggaaggattgcttgagctaagttagaggccagcctgggcaacataatgagacctcccaccctccactccgtttttgtgtttgtttttgtttttgagacagggtcttactctgttactcaggctggagtgcagtggcacgatctcggctcactgcaacctctgcctcccatgttcaagtgattctgcaacctcagactcctgagtagctgggactacaggtgcccgccaccacacccggctaactttttgttttgttttgttttgttttgttttgtttttctgagacagagtctcactctgtcacccaggctggagtgcagtggcgccggcgcaatcttggctcactgcaacctctgcctcccaggttccagtgattctcctgcctcagcctcccgagtagctgggattataggtgcccgccaacacgctggctaatttttgtttgtttgtttgtttgtttgtttgggggacggagtctccctctgctgcccaggctggagtgcagtggcaccatctcggctcactgcaagctctgcctcccgggttcacgccattctcctgcctcagcctcccgagcagctgggactacaggcacccgccaccacgcccggctaattttttgtatttttagtagagacggggtttcaccatgttagccagaatggtctcgatctcctgacctcgtgatctgcccgcctcggcctcccaaagtgctgggattacaggcatgagccacagtgcccggccaatttttgtatttttagtagagacgggtttcaccatgttggccaggctggtcacgaaatcctgacctcaggtgatccatccacctcggccttccaaaatgcttggcttacaggcatgagccaccatgcccggcccccatctctttaaatacataaaaattggctgggcgcagtggcttatgcctgtaatcccagtactttgggaggctgaggcaggaggatcacttgaggtcaggagttcaagaccagcctggccaacatggtgaagccctgtctctactaaaaatacaaaaattagccgggctaacttttttttttttttttttttaggcggaatttcactcttgttgcccaggctggagtgcaatggcatgatctcgcctcactgcaacctccacctcccaggttcaagtgtttctcctgcctcagcctcccaagtagctgggattacaggcatgcgccaccacacccggtaaattttgtatctttagtagagacggggtgtctccatgttggtcaggctggtctcgaactcctgacctcaggtgatccgcctgcctcggcctcccaaagtgctgggattacaggcgtgagccaccgcgcccggccaaggtgggctaatttttaaattctcccagctactcagggggctaaggcaggagaatcgctggaacccggaaggtggaggttgcagtgagccaagatggtgccactgcactacagcctgggtgtcagagcagagtgagaccctgtctcaaaaaaaaaaaaaattaaaattttggctgggtgcagtggctcacacctgtaatcccagcactttgggaggctgaggcgggcagatcgcttgagctcaagagttcaagaccagcctgggcaacatggtgaaaccccatctttacaaaaaatacaaaaattagcggggcatggtggtacacacctgtaatcccggctactcgggaggctgaggtggaagggaggcagaggttgcagtgaacctagatcgcgccactgcactccagcctgggcaacagagtgagatcctgtctcaaaaaaaaaaagaaaagcaaatttaaaaaaaattttttttttttaattgatcattcttgggtgtttcttgcagagggggatttggcagggtcataggacaatagtggagggaaggtcagcagataaacaggtgaacaaaggtctctggttttcctaggcagagtgtttgtgtccctgggtacttgagattagggagtggtgatgactcttaacgagcatgctgccttcaagcatctgtttaacaaagcacatcttgcaccacccttaatccatttaaccctgagtggacacagcacatgtttcagagagcacagggttgggggtagggtcaccgatcaacaggatcacaaagcagaagaatttttcttagtacagaacaaaatgaaaagtctcccatgtctacctctttctacacagacacggcaaccatccgatttctcaatcttttccccacctttcccccctttctattccacaaaaccgccattgtcatcatggcccgttctcaatgagctgttgggtacacctcccagacggggtggtggccgggcagaggggctcctcacttcccagtaggggcggccgggcagaggtgccccctcacctcccggacggggcggctggccgggtggggggctgaccccccgacctccctcccggacggggcggctggccgggcagggggctgacccccccacctccctcccggatggggcggctggctgggtggggggctgaccccccgcctccctcccagacggggcgactggcttggcgggggctgaccccccacctccctcctggacggggtggctgccgggcggagaagctcctcacttcccagacggggtggcagccgggcggaggggctcctcacttctcagacggggcggctgccgggcggaggggctcctcacttctcagacggggcggccgggcagagacgctcctcacctcccagacggggtcgcggccgggccgaggctctcctcacatcccagacggggcggcggggcagaggcgctccccacatctcagacgatgggcggccgggcagagacgctcctcacttcgtagatgggatggcggccgggaagaggcgctcctcacttcctaggtgggatggcggccgggcagagacgctcctcactttccagactgggcagccaggcagaggggctcctcacatcccagacgatgggcggtcaggcagagacgctcctcacttcccagacggggtggcggccgggcagaggctgcaatctcggcactttgggaggccaaggcaggcggctgggaggtggaggttgtagcgagccgagatcacgccactgcactccagcctgggcaccattgagcactgagttaacgagactctgtctgcaatcccggcacctcgggaggctgaggctggtggatcactcgaggttaggagctggagaccagccgggccaacacagcgaaaccccttctccaccaaaaaaaccagtcaggcgtggcggcgcgcgcctgcaatcgcaggcactcggcaggctgagacaggagaatcaggcagggaggttgcagtgagccgagatggcagcagcacagtccagcttctgctcggcatgagagggagaccgtggaaagagagggagagggagaccaaggggagagggagagggagagggagcttaaaaattgttaaattgttatacatttaaggaaaaaacagtgacactggaggggcgaggccagtggaggtgctgtgtgacctcgggcagagccccacccatctctgggcctttggggtccgtctgcgaaatgaattgagggaggcgctggctcagtagtcccttcagggttacctaatcccgcttctcctcccggacttaacggcctactgtctcccctctagtatccattgaaacctggcctaaggtcccagaccttcctttcaactccaaagacccatcctcccaggcagccttccaggctgatcactgtgcctccaactccgtcgttcctgttccgatccccatcacgggctgagggtgaccgtgtttgtttatgaccgccccctccacccacacacctcactgaggtggtggaagtctcctgagccaggctcagaggcggacagtcacggcaggggatgggttcagcggcagcgcattacgctgccacgagagggcgccagcgtcccgcagacgacgcagaggcaactcccgctggagaaactccatgcgacttttctttggggaaactgaagcccagagagaggtcacgccgtcccgtggccacaccgcagctgtggacctgggggtgcccgagcgtcccctgcattcagctctgtggcgggacgggggctgaggatgactggagcaggcacaagggctgcggggaaggtagggtttgccagaggctgaaaattgggaagggaacatcatttcgtaggtaccgctcctgggcgaatgcgccgaggcgcgaccgagtgacggtatgtcaagagcaggttgatgacccgggagcgaggctcttggaggagtccagctggggctgcacgatgatccatgcacaaccttctgaggtcaggactgatttttactttctcccggctctacagaggtggaaactgaggctccaagaggttgtcatttgcccagagccaccagctaagcgggacttgaatcaggaaaggggtgcagcaggcaccagtgtggagggcggtcccacccacctcctccacttctccctttgcatagcgggggaaacaggcctggaacagtcataggctctctggccctcaactggggcgagagtcccccgccccaaatcgggctggacatgcctcgagtcacgtcaacgaggggcggctggtgagtgattaagccgagaggctgaaggctctgctaggtgacctcaggcctgggccctgcctctgcacctctttttttcctctttacccccggggtccgcgagagaccagctctggcagcctaagggcttcagtttctccccggggtccgcgagggaagggggcagccggcggtgagcaggggcgtttgttattttgctccacgcctgggcagagccacgccccttgtcgcgctattggtggagtcccttcccggggcggggaagagacggtgaccccacccccccccgccctgccgtataaaagcggcgccgacgcacggcgcggggattttctgctccggttggtgagcgcgcctgcgcgttgacggcgattttgcgttctgaggctgcagcgtcggcatcttgagctgccggttcgcgagttcgaggccaggttccgcctgtcgtgggttcgcaccccggacgcgatgctattcgacaaggtgaaagcgttctcggtgcagttggacggcgcgaccgcgggcgtcgagcccgtgtttagcggcggccaggccgtggcgggccgggtgctgctggagctgtcaagcgccgcgcgtgtgggtgccctgaggctgcgcgcgcggggccgcgcccacgtgcactggaccgagtcgcgcagcgcgggctcgagcacggcttacacgcagagctacagtgaacgcgtggaggtcgtgagccaccgcgccacgctcctggcgccaggtacggatggaggacccctgctccaacaccagttgtgtgcctcccaccacctggacggcggtacctccgtcagccctgggaccccagcgcaaccgctcagtcgcctcctttttctcctacctgcagataccggggagaccacgacgctgcctcctgggcgccatgagttcctgttcagcttccagctgcccccgtaagtcctctggggtgcagggttgccctaagcctgcagccccttccagattggtacctccaatactggatatctgggcacctctgagccccaagactctccccctgggaggcccccggagtgtctgtgtctccttctccctgcctgcttgtctctgtatcttgtcccctgaagtcccgtccctccaccctaggaccctggtgacatccttcgagggcaaacacggtagtgtccgctactgtatcaaggccaccctgcaccggccctgggtcccagcacgccgggcaaggaaggtgttcactgtcatcgagcctgtggacatcaacacgccagccctgctggtgagtggccacccttggggaggtaggttgggagtattgtaggaaggggcctgcctggctgctgggcgacaccaaccaataagatggaggtcataggtgggccctggcagggagggaggcaggtgtgggaatgcgtgtggaatccactgggatctgcacccatttgccgtgtgactctgggcaagtgtcttgaagccctctctgagcctcagatgcctcttctgtgaaatagaccagagctagggcttaccaagtgtgaattacacaccaaacacttggcttatacatttcatttctggctttataagatgggttgtgttcctggctctatttaacggatagttcctggattgttaaaaagaaaccaagccctgcccaaagtcctccctcagctgggggtggtttggaagctccacagcgactgtggtttgcacaaagtgactcatccatgtcactttcctctacaccgacaggcacctcaagcgggggctcgggaaaaggttgcccgatcctggtactgtaaccgtggcctagtctccctttcggccaagatcgaccgcaagggctacaccccaggtagcaggcggaccggactgggttgggacgggggctggtgttggggttgcaggaggggaaactgaggccccactgctccttgctgcaggagaggtcatccctgtctttgccgagatcgacaacggctccacacgtcctgtgctgcctcgggcagccgtggtgcagacacagacgttcatggcccgaggcgcccgaaagcagaaacgggcagtggtggccagcctcgcgggcgagccggtgggccccgggcagcgggcgctgtggcagggccgggcactgcggatccccccagtgggtccttccatcctgcactgccgcgttctacacgtggactacgcactcaaggtagggcatcctgctggccctgggggacagtgcctacattcaccctgtattccctcagactgggggaagctgaggcctcagtctccccaggcataggagggaggtgggggttggggaggctgcctgggcaccctcccttatggttccttcctccaggtctgtgtggatatcccaggaacgtccaagctgctgctggagctgccactggtgatcggcaccattcccttgcacccttttggcagccgttcctccagcgtgggcagccacgccagcttcctgctggactggaggctgggggccttgccggagcggcctgagggtaagctcccaccctgcttgcatgcagagggtgggtggatacacggagaggtggatgccgggtcaactctctcaccacgagtcccccggaatcccaaccaaaggacatacagcctggcagccccagagctggcacaagccagctcctggcccctggtcccttggagcagggctctctcctgccaacctcacccaccctgtctctcgcttccagctcctcctgagtactcggaggtggtagccgacactgaggaggcagccttggggcagagccccttcccgcttccgcaggaccccgacatgagccttgaaggcccgttcttcgcctacatccaagagttccgctaccgcccgccacccctgtactctgaggtgagctcaggggtctgagaaccacccatgcctctctgggccctgggagccttgatggggtggcagacatagtagatgggttttttttgtttttttgtttttttagacagggtcttgctctgtcacccaggctggagtgcagtggcataatcatagctcactgcagcctcgacctcccgggctcaagcaatcctttcgcctcagcctcttgagtagctgggactacaggcacacgccaccacatcctgctaatttttgtgttttgttttgttttgctttgctttttgagatggagtttcagtcttgtcacccaggctggagtgcaatggtgcgatctcagctcacttcaacttccgcatccctggtagagcgattctcctgcctcagccttccgagtagctgggattacaggtgttagccaccacacgtggctaatttttgtatttttagtagagacggggtttcaccatgttggtcaggctggtcttgaactcctgacctcaggtgatggcctgcctcggcatcccaaagtgctgggattatatgcgtgagctaccacgcccggccaatttttgtattttttgtagaaatgtggtctcactgtgttgcccaggctggtcttgaactcctgggctcaaatgatcctcccatcttggcctccccaaagtgctgggattacaggcgtcagccactgtgcccggctggcagaggattttaattgttgacagaatttcgctacatacagtcggccctctgcgttagctggtttggaatctgcagattcaaccaaacatgggtcagagacatttgaaaaataaatacatacatggataatacagattaaaaatatgataggctgggtgcggtggctcatgcctgtaatcccagcactttgagaggccaagatgggaggactgcttgaggccagaagtataagaccaacctgggtaacatagcaagacccccatctctactgcaaataatacaaaattacccaggcttggtggagcccatctatgattgggaggctgaggcaggaggatcgcttgagcccaggagtttgaggctgcagtgagcaatgattgtgctactacatactccagtctgggagacaaaacaagacctcatctcaatactactactaatagtaataatgcagtataacagtgattaaatagcatttatattttgtgtgtgtatatgtgtatatatatatatatatattttttttttttttttttttttgagatggagtcttgctgtgtcacctaggctggagtgaagtggcacaatctcggctcactgcaatctccacctcccgggttcaagcaattctccctgtcttagcctcccgagtagctgggattacaggcatccaccaccatgcccagctaatttttgtattttttagtagagacggggttttgccatgttggccaggctggtctagaattcctgacctcaggtgatctgcctgccttgacctcccagaatgctgggattacaggcgtgagccaccacacctggccataaagtattataggtaatctagaagagatttaaagtacacgggagggctggatgcagtggctcatgcctgtaatcccagcactttgggaggctgaggtgggcagatcacttgaggtcaggagtttgagaccagcctggccaacatggcgaaaccaggtctctaccaaaaatacaaaaattagctgggtgtggtggcatccacctgtgatcccagctactcacgaggctgaggcaggagaatcgcttgaacccaggaggtagaggttgcagtgagccgagattgcgccactgcattccagcctgggtgacaaagcgagactctgtctcgaaaaataaaatgaaataaaaataaagtacacaggaggatgggcttagattatccgcaaatattatgccattttatatcagggacctgagcatctgtggattttggtatccacggggttcctggaaccaatcccctgtggataccaagggacggtatacactcagctccaaaaccctccttgcaccccagtctgccctagacaccacctcctgatggcctcatccctggtcaagggcgggagttgggagatggctagatggggagcggtatttctgaatttctgtttccagtgttctctgaggcttaatgggaacatttctcttaggaggatccaaacccactcttgggggacatgaggccgcgctgcatgacttgctgaacggcacagggacccctcgaggaacaaggttgcacaccagctttcagccaccatgactgtggggagtggctggaccaagggctgacctccccgactgcatcaaagttggggaaccaagtctcagagtgaggcgggggcctttcggatatcacatgggacagaggaagagcccggctggaatctgacttacctggaccgctgtccttgtgaggcattgaatgcccagtgcagtatccgagagactgtttaataacctgtcttcccagccaattggtggtgctggaatcccctaggagccttcagtctgggagaaacagagccagacatagacagttccagcatcacagaaccagaagaagagacctgcaactgtgagagtccagacaggaagcagagaaggcgtccttgcggaaagggcattttagctgaggctttggagtacgaataggagctcagcaggcagacgaatgaggaataaaggtcagagaaggtcagagctgagtgacgtttggaatccaccccgtttattgtagaactgggggttcagagggcaggtgcctcagagttgaggccacacagtgaggtctggtgggtgaaaggacccaggaacgaggcgttcaggaaagcaggttgtcagagctatgtggagtctgtgggtggcaggggcagccgctccagcctttgaagactttgaaagccagagattcctggcgcaggcttggacttcctgggagctcctccaagtacccaggggcatcagagctgcctgggtgttacatggcccagggaacccaggttcagggtaggacaggcaagaccagatacccaatgtgcaaagtgaaaacactgggctccctgttaaacgatgaagaattcaagacagtgacagcattacgtcacccctggggacagaggtcagcctaaggtgacacacggggactactgtgcttccggaggctccctgtgtcctggaggagaaaagcattagagggggcagctggacaagctcccaactgcagagtcccagccctggctggggcagggccccggcctgggactcagcatttctgatatgccttaagaattcattctgttttgtacaattattttttaaaagtaaacgtgtggagaaagaatccgggcttcttggtttatttccgcccccgatctggctgctgagggaactgggactgccatccctggtcactatcttggagactaaattcctggccaaggaaggcaaaggggctcatgattgagaaggggaaactgaggcccaggactgggagggggttggtccaaggacatatgaggaggctgagctggggtgggagctgagccctgggccccatacctgcaccgcctatcggagtctcagaggctggcgggggctgaacagtggaggacaagcagagaactctatcctcagagagtggggagcagggggctggggctgggaggagccgcctgagtacgggaacatcctgtcatctgagtctaggtttggtttttgtgggtttttttctgtttgtttttgtttttcagaaggagtcttgctgtgtcgctcaggcatagtgtagagtgtagtggtgtgatctcagctcactacaacctccacctcctgggttcaagcgattctcctgcctcagcctccaagtagctgggattacaggtgcctgccaccacacccggctaatttttgaatttttagtagagacggggtttattttttttttctttctttcttttttttttaagacagagtttcgctgtgtcacccaggctggagtgcaatggcttggtcttggctcactgcaacctccgcctcccgggttcaaatgattctcctgtttcagcctcgaaagtagctggaattacaggcatgtgccaccacgcctggctaatttttctatttttttagtagagacagggttttaccatgttggccaggctggtctcaaactcctgacctcaggtgatctgcctgcctccgcctcccaaagtgctgggattacaggtgtgagccaccatgcctagccctggatttgtttttattgaggtgaaattcacatattgtaaaattcaccacttgaaagtattcaatttagtacactttacaatgtagcatttaatactcataatgtttcttttgtttggttttgagatgttctcactctgttgcccaggctggagtgcaatggcccgatcacagcagcctcaagagatcctgggctcaagagatccacttgcctcagctcctcgagtggttgggaccacaagtgtgtaccaccacacccagctaattatttttttgtagagacacgatctccctttgtttctcaggtgggtcttaaattcctgggctccagcagtcctcccgcctcagcctcccaaagtactcggattacagatgtgaaccatcacaaccgacctggctatttacgatgttatgcaaccatcaccaccatctatttccagaacatttctatccctgccaaaggaaaccctgtccccactagtgatcaatccccattccccttcccccacctccagcaaccactttctgtctctggatttgcctattgtgaacatttcatatcaatggaatcatgcggccttttgtgtctggcttttatcactcagcatgttttccgggttcatccacattgtactatgtgtcagaacttcattcctttttctggttgaataatattccattgtgtgcgtagaccacattgtgtttagccattcatccgcggatggacatctgggttgtttccacggcttggctatagtgaatcttgctgctaagaacacgtgtgttcaaggattactttgaaaacccacggagctgttaggtggccctagtggcgtggggctgttattcttctggagttacaggtggggatagtgagctcaagagaaagagactagcctggccaacatggtgaaatcctgtctcttctaaaaagaatacaaaaatcagtgagacgtggtgcaggcacctgtaatctcggctacttcggaggctgaggcagaagaatcacttggacccgggaggtagaggctgcagtgagctgagatcatgccactgcactccagcctgggtgacagagtagtgagaccctttctcaaaaaaaaaaaaaaaagaaaagaaaaaaaaggaaataagaaagaagggagggagggaggagaaaagaagagaaaaaaaaagagaaaagaaaagaaaggggggagggagggagggagagagagagagaaagagaaacaaagggaagaggaaggaagggagggagggagggagggagagagagagaaagagaaacaaagggaagaggaaggaagggagggagggagatgctccacttgggtcccacagtcaggactgagacggccagcactcaaaactgccccttgggccaggcacagtggctcacacctgtaaatcccagcactttgggaggccaaagcaggagaatcgcttgagcctaggagtttgagaccagcctgggcaacatagcaagatcccgactctacaaaaaaaaaaatatataaaaaattaaccaggtgtggcagtgtggacctctagttctagctactcagggggatgaggttaggaggatcacctgagcctgggaaatcgcggctgcagcgagctatgatcgcaccactgcactctagccttggcgacagagtgagatcctgtctcaaaaaaatatataaacactgcctcttagactccagagtccatgccgccctcaggccacatgatactgtgcccctcaagctcctgctgaagctctgcctgtctcacctaagccctcgtgcccctccaaggttgggcaaggccctattgaaaccctagtctgggccgggcgcggtggctcaagcctgtaattccagcactttgggaggctgaggtgggtggatcacgaggtcaggagaccaagaccatcctggctaatacggtaaaaccccgtctctactacaaatagaaaaaaattagccgggcgtggtggcgtgtgcctgtagtcccagctactcgggaggctgaggcaggagaatggtgtgaacccaggaggtggagattgcagtgagccgagatcgtgccactgcactccagcctgggtgacagagcaagactgtctcaaaaaaacaaaaacaaaaacaaaaagaaaccctagtctgatagcccaggctgtcccagccagcctgcccaaggcagcagaaattaactggcaggctggaggctggaatggccattgtcagggctaggagccagggatgaggactgggggacccaggggctggacatgaggagatctgggttaggtagggcttggctctctgtgtgactgcaggcaggtcaccttgcgtctgagcctgttttgtcatctgagactctgggagacagcccatccccacaccctaccacagtcctcaatcacgtccttcctctggcctgagggtgagccctcctttcctgctacccctggttctaaggtctaccaagacctcctttgacctggcatcaagcttggagcatgccatacatgggaggtccctggggccagcagagaggaagcattcccacagcacagtcactagaagccgaactgacagtctcagtaggaaatgagttatttgtcatgcggggtgtgcaagacatatcagtttccagatccatgttcccaaacagaggagagtctaaggtatttattccagcaagggatgtgggtacagtgcgacaaaaagattccacccagcgggggtgggaggacaagacgccccgtgtcctcaggactcctgagtctgcaactatggggaacttgatcctgacagaaggagaactttccggttcagatgatcaacaaccaggattaagctggcccagatagtcccaattcaggaaacttcctgaacatggggaggggcctagggagcccaaaggcaggtggtcaacttctatcaaacatgaaatgaggccgggcgcggtggctcacgcctgtgatccagcactttgagaggctgaggtgggaggatcacgtaaggccaggagtttgagaccagcctgggcaacagagcgagaccccatctctacaaaaaaaaaaatgtaaacattagctgggcctggtggcatgtgcctatggtcccagctactcaggaggctgaggtgggagaatcacttggcccaggaggtctagcctgcagtgagcgatgatcaaaccactgtactccagcctgggtgacgtggcaagaatttttctccaataataataataataataacaacaacaacagcaggccgggcacagtaatcccagcactttgggaggccaaggcgggtggatcacgaggtcaggagatcaagaccatcctggctaacacagtgaaaccccatctccactaaaaatacaaaaagttctccgggcgtggtggcgggcacctgtagtcccagctactccggaggctgaggcaagagaacggtgtgagcccgggaggcggagcttgcagtgagtaagtggagattgagccaccgcactccagcctgggcgacagagtgacactctgtctcaaaaataaataaataaataaaaaataacgaaataacaaaaaccccaaccctctccaggcccgtaagaccccctgcccacctctccctccagctccccctccctccccgtctgctactcaaacactccaagctgatttttatttttattatttttatcttttagacagagcctcactctgttgcccaggctggagtgcagtggctcgatctcggctcactgcaatctccgcctcccaggttcaagtgattctgcctcagcctcccaagtagctgcgactacaggtgcccaccaccatgctcagctaatttttgtatttttaataaagacagggtttcaccatactggccaggctggtcttgaacacctgacctcaaatgatccacctgcctcggcctcccaaagtgctgggattacaggtttgagccaccgcgcccggccctccaagctgatttttaccttggggacttctcatatactattccccctgcgaaaaggctcttcccccattggtggtttctctttaccccctggcctcactttttcagagccactccaacctcctggccaaagttgccaccccctccatcactccctctcctatctctctgttctgtagtcttcctagccctcatcacgctctgaaattactacttagatgttcatttgtttgtctgaccctctgtgggcagggccagatccaggctctgacccccgccccagcatgcagcaggcatgagggtggttgactaagtgactgggggaccactgctctgcctactttgatgtggatgaagactcctctttttttttttttttttgagacagagtctcactctgttgcccaggctggagtgcagtgggttgatctctgctcactgcaagctccgccccccgggttcatgccattctcctgcctcagcctcccaagtagctgggactacgggcgcccaccactacgcctggctaattttttttttgtatttttagtagagacggggtttcacagtgttcgccaggatggtctcgatctcctgacctcgtgatctgcccacctcggcctcccaaagtgctgagattacaggcatgagccaccacgcccggcctttttcttttttttttcttttctttttttttttgagacagcattgtccaagctggagtggaaagcctcgatctcggctcactgcaaactctgccacccgagttcaagcaattctcatgccttggcctcctgactagctgggattacaggcacccatcaccacgcccagctaatttttgtatttttagtagagacagggtttcaccatgttgcccaggctggtcttgaacttctgacctcaggtgatctgcccatcttggcctcccaaagtgctgggattacaggcgtgagccaccatgcccagctcagatgaagattctgatgggggtggaggtgtcatcccttgcacttgctcccaagacctcctagagtcagacgtgtcccccatgcagagtcaaatgctaggtctctatctctcagtgtctctgtctgtttcattctgactctcaccatcttttctttcccatctctgtctctctctcaatatctgtcttgcttactgtctctgtctctgtctctcagtcttattgcctctgtacttctgtctctttctccctgtctctgtctccctctgcctctgattctctcactatctctcttggctaccatctctctgtctctttgggtccctgactctctcaccatctctgcctcctgccctggcccggccagctgggggacaaggggtgacaagcagtcagggcgcccgctgcttgttttcccacccacgctggcagggagcccagcccagccgggccactgttcaggaatcctccagcctccccgctccagccaccaggcgcggccaccgccagcctctcctcccagcacattctgtcccaagcaaagagcgccagagatggggtgggggtgggggtgggagggggacgcattcctgctgagctccagttacaggacagcttgtcctggtggccccaccagcacaacctcctgatggctccccatcctgctgtggggttagaccttcctgaatgaagccaaagcccctctgccagttcgtgcccacctcagggcctttgcaccagccataccttccacctggcactctgtctccctagatctccccaagacctcctccgcctgcacatctgagacctcacatcaccttctcagcaagtcccctctgtccctaggcccgggcaccccaaattcccctcctgctgccccagtgcatttaatttcctggtcctccccatgtccctggggttacatattcacttgtttgttgatgtggtgtctattacaccaggtccccactgtgtcccagcaccctgaacacacagtaggtggcttagtgaaggtttttacaattgacatctattcctcccaaagctcagcccgcccaggctcatccatgtggatccacagttctgaccaccccacctctgcctcaccctgcctccgccacccctgcaccctaatgcagcaggatttcccaagcccccctgccttggcccagggagttatctccaccagatccacctttctgagcgaggagctgggtgcattgaggggcaggggcggctggagttcagatgcaccttttgagcgaggggctgggcctctctgtcgctgggctccaggcacagggcagtcatgatgtacacacacacgtgcaaacacacacgcacacacataagcctgtcagcaacatagaaacaccagccagtgaactcgggcacaagcagccgggcacagagtgttcaccaggtgctcacatgtggagtaccccaactcctaggaggatgcggttatggcctggatcctacaggtggggcccagacatgggctttgaacccacgccagggtatgcacaaacctatccaaacacacgcgtgtctgccctagcttccctcacccgggagtcacccccccaccccccaccttgtttttgatgttcaggaaagtccccagaaagcactgggcccgggcaaggggccaggaggaaatggtgactcagccggtggccatcagtgcctgccacgctgggctgggtggactgcgcggcccgatctgggaggatccacagaaaacaacaataaaagatgagggcgtgggtgcggggtaaaaaggactcagcccaagaatgatcagagaggggatggatccccctgtgctccaacacttcaaccctgctgggcctgattgacaagtggggaaactgagacacagggaacaagtgacttcgccaaggcccaccagccaagatggtacaggcaaggggatccctaagtccttaacacaggggtctggaggaatgtctacctgccctgcccttttttttttttttttttttggagacagggtctcactctgtccgtcaggctggaatgcagtggcatgatctcagctgactgcaatctccgcctcctgcctcagcctcccaagtagctgggattaccggcgcctgtccctatgcccaggtaatttttgtatttttagtagagatggggtttcaccatgttggccaggctggtctcaaactcctgacctcaggtgatctgcccacctcggcctgccaaagtgctgggattacaggcgtgagccacagtgcccggctccctgccccactttctgagacccagatccacttcctggtttcctgtgtggtcatgtgaccacacttggccaattggagccttttgttatcacaggcacagggattgggtcagggctgggcacgtgatcctgcctgagccaatcatgctacgagtttggagactccctggaagaaggcctagaagtaaggaaaaccatcttggacgcatgatgatggcagtggatcagagtcccaaggacactggtgaagatcagagcaggactcacacaacctcagatccctgtggagtcagggtggaaccagagggaaggctgaaggctggagggtcctgagaggccttgcagaaagagaggacattggagctggggctttgatggatgaagaggaactagggaaaggcatttcaagcagagggaacagcctgtgcaaccacagcaggcaggtgggagctaggcgtgtcctcagccaccccagtggccccatggggctggagcatagagaggcatctgcaaatgtgtttatttgtttattgagacggagttttgctcttgttgcccaggctggagtgcagtggcgcaatcttggctcactgcaacctccgcctcccgggttcaagcgattctcctgtctcagtctcctgagtagctgggattacaggcgcacgccaccacgcccacctaattttttgtatttttagtagagacggggtttcaccatgttggccaagctgatcttgaactcctgacctcaggtgatccacccgccttggcctcccaaagtgctgggattacaggcgtgagccactgcgcgtgactatttatttatttttttagatggagtctcactctattgcccaggctagagtgcagtggcacgatcttggctcactgcatcctccgcctcccaggttcaagtgattcttctgcctcagcctcctgagtagctgggattaaaggtgcctgccaccacgcccggctaatttttgtattttaatagagacggggtttcaccatgttggccacgctggtcttgaactcctgacctcaagtgagctgcccgcctcagcctcccaaagtgctgggattacagacgtgagccaccgtgcccggtttaaatgtgtttatttgtctctgtgctcaattctcccacctacaagccccctaagggcaggaccgggtttgctttgttggtggccagcagttgtccattaatgtttgtgatacaggtgaaccaggccacgtgaagccttgaaccggggctgagagccagcgctttcttttggggacacaaaacaggcaggatgggcagggggtggtgaatagaaaagattgggtacataaggcagaagagcctggggctttataggggtggcccctgaagcctgtgacccaggagggaccaggcccaggccacagtccaggcaggagagggcgtgtccccatctgtgaacccccacccccagaccctggccatggtgcttaggagggaggcagcatggagcttcgggtctgggctctgggaccacctcttcctccctgtgtgaccgtgggcaaacgacagcacccctctgagcctcagtttcctcatctggagcttgacttcactgtacgtcagtgtcaggactgggcacagagtgggtgcagcgtctgtggggcagcatgggggtgctgaggcagtgggtgaggggtaggctcgtctggaacatgccgttagcagttcccagcctctttgaaaacaggaaaccggctctcatgggagcccccagctgtgcttcctgagtctccgcgtgacgtgcgcgtgctggggcagtgtgggcaggcatgtgtgtgtttgcgtgtttgcaggcggcctggaatataggtggatccgcctgcgtgtgcatatgtgtgtgtgtgtgtgtgtgtgtcgggccgcacgtggcattgcccagaggcatgtacacacacaaccgttacctgtgctcgcatgtggagctatggatctcagccagtgtgggaagcagacagtgggttggttggggcacttttgagtctgggtctaagtgttaagtctgtgtgtccgtcagcagaggtgactggtgtgtgctgggactgacttgggccggcagagcctgtatcgtggccctaaggcctccgaaaccccaggtcagccctgattcagctgctgatgttggctttatttatttatttattttgagacagggtattgctgtgttgtccaggctggagtgcagtggtgccctgttagcccactgtggtctcgacctcctaggctcaagctatccttccacctcatcctcctgagtagctgggacaacagacacacaccaccacacccagctaatttttgtattttttgtagacatggaatcttactacgttgcccaggctggtctccaactcctgaactcaagcgatcggcctgtctcaggctccaaaagcactgagattacagacatgagcagtggccacttttttttttttgagacagtctcactctattgcccagactggagtgcagtggtacaatcatatctcactgcagcctcgacctcccaagctcaagtggtcctcctccttcagcctcccaaccatctgggaccacagacacaagccaccatgcccggctaacttttttttttttttttgagatggagtctcactctgtcacccaggctggagtgcagtggcaagatctcggctccctgcaacctctgcctcccaggttcaagtgattctcctgcctcagcctccagagtagctgggattacaggcatgcaccaccacatctggccaattttttatatttttggtagagacggggtttcaccatgttggccaggctggtctcaaactcttggagtgatcatcctgcctcagtttcccaaagtgctgggattacaggcgtgagccaccatgcctgtaattttattttttttattatttttatttttgtagagaaacataggtttccctatgtttccagggctgatctcaaaatgagatcctcctgcctcggcttcccaaagtactgggattataggagtgagccaccatgcctggtctacaacaggttcattgtcacctcagggccttttattttttttttcttttttttgagacagagttttgctcttgttgcccaggctggagtgcaatggcacaatcttggctcaccacaacctctgcctccagggttcaagcgattctcctgcctcagcctcccaagtagctaggattacaggcatgcgccaccactcccggctaattttgtatttttagtagagatggttgttctccatgttggtcaggctggtctcgaactcctgacctcaggtgatctgcccgcctcggcctcccaaagtgctgggattacaggtgtgagccaccacgcccggcacctcagggcctttctacgtgttgttctttctgcccagatagctcttcctctcgctcattacaaagcctgcacgttctcttcctgaagatgtcagtttaagcatccactccttagagacctttccacctcttcttgtttcttgtttttttgttttaattttttgacaagagtcttgcaggctggagtgcagtggcgtgatcttggctcactgcagcgtctgcctcccaggttcaagcaattctcctgcctcagcctccccaagtagctgggactacaggcatgtgccaccacagccagctaatttttgtggtggtgttttttttttttttcccgagacggagtgttgctctgtcgcccaggctggagtgctgctctgtcgcccaggctggagtgcagtggcacaatctcggctcactgcaagctccgcctcccgggttcacgccattgtccggcctcagcctcccgagtagctgggactacaggcacccgccaccacacccggctaattttttgtatttttttgtagagacagggtttcaccgtgttagccaggatggtctcaatctcctgacctcgtgatctgcccgcctcggtctcccaaagtgctgggattacaggcgtgagccaccgcgcccagcctaatttttgtgtttttagtagagacggggtttcaacatgttggccaggctggtcttgaactcctgacctccagtgatccacccacctcagcctcccaaagtgctaggattacaggtgtgaaccactgtgcttggctcctttcacctctttcacaaaagctgccctattctccctctcagttccttccaattccttgctttgcctttctcacagtttgtgattacaatgtattgacaggttcacggcctgtcttccacctcccctcggtactgggagctccaagagggcgggtcatagcatgcagtaggtgctcaataaatttactggctgggtgtggtggctcatgcctgtataaagcactttgggaggctgagatgggaggatcccttgaggccaggactttgagaccagcctgagcaacatggtgaagccccatctctactaaaaataaaaataaaaaaaattagccaggcatggtggcacacacctgtagtcctagctactggggagactgaggtgggaggattgtttgagcccaggaggttgaggctgcagtgagccgtgattgcaccactgcactccagcagaatgggaccctatctctaaaataaataaataatataaaaataaatgcagtatgctaaatgagagtgcctgcacaagatgcagagagccaggaatggggaggtggaagacaagggccctccctcagtagctgctcaattagtgtatgatggattaatgaagctcagagtaagaccttgacccactggtcctggactcctaaagaggagtcttctggcctcatccctagcctcctggccccagatcacactgtgtgagcagcccctggagcctgcttggcaggggaggaacagaagtccctgctcagttatttgcacactggcttctcccacgaagtcctaacatcgcaacttcaagtgccctttcctttcagaccccaggcctggaaaggtctttattttggccacctcagcccattgcatggaagggatatccaaggtcagaagcaatcccgtccctgtgtccaggttgagcatgtccctcctctgctcacacaccctccgtggctccctattaccctcaggagaaagtccagctcctcagctcagcagtcacagtccagcctgagtgtggcaagatcatttttcctttgtctaattctcagtcactctttgggtctcatcttggttatgtttcccagtattgaccattgacacagtcccaggacacactaactgctgtcagaaaccaaatgttcattgcattaatcttgtcagaacatcaggctgaatacgacttttattgttgttgttaagagactgtgtctggctctttcacccaggctggagtacagtggtgcaatcatggttcactgcagcctcaacctccgggctcaagcgatcctcccaccttagcctcccgagtagctgggactacgcacactaccacactcagctaatttatttattttttatagagatgaggtctcactctgtcgcccaagttggagtgcagtggtacagtcatggctcacgcagcctcgacctctgggctcatgcgatcctcctacctcagtctcctgagtagctgggactacaggcacacagcaccacacctggctaagtttttttttttttaattttttgtagagacaggtctcaccatgttgaccagcctggtctcgaactcctggactcaaacgattcctccccactctgcctcccaacgtgttggattacaggcatgagccgccacgcccattaggatatgactttttttgtttgttgttttgttttttgagacggagtttcgctcttgttgcccaggctggagtgcaatggcacgatctcagctcactgcaacctccgcctcctgggttcaagtgattctcctgtctcagcctccctagtagctgggattacaggcatgtgccaccacacccatctaattttgtatttatttttaatagagatggggtttctccatgttgatcaggctggtctcaaagtcccgaccttggcctcccaaagtgctgggattacaggcgtgagccaccatgcccggtctaggatatgacttttacagagtaaaaagactcacagtttgcattgcatgtgaccactgtggaccattgactattaacagagtattaaattcaatataaagaacagtgactgcccaagagcttagatcaggaataggcaaacattttctataaagggccagataggaaatatttgaagctttgccggctacacagtctcttttgcaattactctacgctgcggctgtttgaaagcattcatatacacaaataagtgagcatggctgtatcccaggaaaactttgttcatggacactcaagtgtgaatttcatgtaattttcacatgtcatcaaatagtcttcctctggtagtttttcagtcattttaaaatgtaggccaggtatggtggttcttgcctgtaatcccagtgcttggggaagctgaagtgagaggaccgtttgaggccaggagttcaagaccagcctgggcaacatagggagaccccctcctccatccttacaaaaagttttaaaaattagctgggatgcctgtagtctcagctattcagtaggctgaggtgggaggatcacttaagcctgggagttcgaagctgcagtgagctatgatcccgccactgcattctagcttgggtgactgagagagatcttgtctctaaaaaaaaggagggagccagggccggtcatggagaccatcctggccaacatggtgaaaccctgtctccactgaaaatacaagaaagaaagtaaaaaaaaaaaaaaacccaaactagctgggcgtggtggcaggcgcctataatcccagctactcgggagggtgaggcaggagaatcgcttgaacccaggaggtggaggttgcagtgaaccgagatgaaggcactgcattccagcctgggggataagagtgaaacccatctcaaaaaaaaaaaaaaaaaaaggagccaggagcggtggctcacacctataatcccagcagcactttgggaggctggggcaggcggatcacttgagaccaggagttctagaccagcctggccaacatggtgaaaccctgtctctactaaaaatacagtaattatctgggtgtggtcccagctactcgggaggctgaggtgggagattagcttgaacctgggaggcagaggttgcagtgagccgagattacgctgctgcattccagcctgggcgacagagtgagactctgtctcaaaaaaaaaaaaaaaaaaaaaaacggaaaaaaaattgaatactgttttggggtcatggttaaagctgaagtttaccaacccctgatgggtcataagtgtcatgatttgtgtttacagagtatcagaactttgtttaaagttaccagctgataaaatatgaggacaggtttatggctaacagggtttcatcattgacagatagcaagtatcaggattagtcttttttcacaaagtatcagaacacagcaagctctgatggctaatcaggtgtcagaacctgggtttaagtccaaccctgccttggggcccacggcaccgcggtaaccaccaactactgtccactctcaggatactgtttactaagtatcgagtgacaggctgatggcaaagtatcgggtcatggatgtcacactgtgagttgggcactgtgacagcgtctctagatgccagctgtttacagtgacaggagactggctgtttacaggggatgagtcagccccacttccagatacccaagtccagatggcgggtaggattggcacctctccaggtgtttacagggtactgaggtcctggcaagctgggcttctctcctgcggccacctctagccagggtggggaatgagtcccctgaaggctgtgggacccatgatcctggttagattctccttctgcttgtccctggctgtgctgcctcaggcacattacttaacctttctgggcctctgccacctcatctgtaaaatgggcatgatggtgaagccaggttgccagataaaatataggctactcagctaaatgtgaagttcagatcaatattgaatttggttttactgtaagtatatcccatgcaacatttgggatatacttatactaaaaaaaaattattcattgatgctatggtttgaatggtcccccaaagttcatatgtttgaaacttaatcctcaaagcagtcctttcaaccttgtcaacctgtcggcgcggcctctggtgcagtggcggcggctcctgttcctgccgcagctctctccccttcttacctccccaccagatcccggagatcgcccgccatggctttacttactgcggccgcccggctcttgggaaccaagaatgcatcttgtcttgttcttgcagcccagcatgccagtgcttcctccatgaatttgaaagacatattggctgacctcatacctaaggagcaggccagaattaagaccttcaggcagcaacatggcaagaaggtggtgggccaaatcactgtggacatgatgtatggtggcatgagaggcatgaagggattggtctatgaaacatcagttcttgatcctgatgagggcatccgtttctgaggctttagtatccctgaatgccagaaactgctacccaaggctaagggtggggaagaacccctgcctgagggcttattttggctgctggtaactggatgtatcccaacagaggaacaggtatcttggctctcaaaagagtgggcaaagagggcagctctgccttcccatgtggtcaccatgctggacaactttcccaccaatctacaccccatgtctcagctcagtgcagctgttacagccctcaacagtgaaagtaactttgcccaagcatatgcacggggtatcagccgaaccaagtactgggagttgatttatgaagactctgtggatctaatcacaaagctaccttgtgtcgcagcaaagatctaccgaaatctctatggagaaggcagtggtattggggccattgactctaacctggactggtctcacagtttcaccaacatgttaggctatactgatcatcagttccctgagctcatgcacctgtacctcactatccacagtgaccatgagggcggcaatgtaagtgcccataccagccacttggtgggcagtggcctttcagacccttacctgtcctttgcagcagccatgaacgggctggcagggcctctccatggactggcaaatcaggaagtgcttgtctggctaacacagctgcagaaggaagttggcaaagatgtgtcagatgagaagttatgagactacatctggaacacactcaactcaggacgggctgttccaggctatggccatgcagtactaaggaagactgatccacgatatacctgtcagcgagagtttgctctgaaacacctgcctaatgaccccatgtttaagttggttgctcagctatgcaagattgtgcccaatgtcctcttagagcagggtaaggccaagaatccttggcccaatgtagatgctcacagtggggtgctgctccagtattatggcatgatggagatgaattactacacagtcctgtttggggtgtcacgagcattgggtgtactggcacagctcatctggagccgagccttaggcttccctctagaaaggcccaagtccatgagcacagagggtctgatgaagtttgtggactctaagtcagggtaaaactggagactgggggaaagtgactaccagaaagtgaggaagcctaaataaaaagtatacttttgtttcagggggcctttaaagacttaagattaaattatatctgaggcactgataatatgtttgaggttaaaatataaattaagactttaaaagatgaaaaatggtcccttcttccctaatcagctcctttcccctgcctggtatgagttgcccatcacaggcatggtcctggaggatgaccaggactaatgcatgtggtatgagtaggtttggccccctcactatctctagagtgagaatctggctcctgtttccatggctcaaagccggttgcagagaatctgcagtcacttcggagctttagcttcttctctgccaagccctcaataagccagcaaaccaggactctgccccttctgtttccataggaatcatgttggatagtcagctgtaccaagccccttggccttcccatgcacacaaacacctcctagcaagacctgttggttagctggacatgctttggcaatttttttatactgccaagtgaccataaaggcatggcatttgttgtgactggcacccaatgtttgattttttttttaaactatccaattaaaattaaggtctgggagtgttctgtttcccattactttaatactcacccccctcccagactttctacacctgtttcacctcaggctgaggatgttctggacctccccctcttagtccctactagagacctctcaacagatctgtgggcccagtcattgggttttatcagtgcttaatgtgaactaagttttttacttccaacagaatacaagccactaccttctgacctccccaccccccaccaacccccagcttttaatatgctgtggggcatagaacagggactccggaatgaccagcatgatattttcagagtcttgtccctggggtattagcacctctttttgaacagagaattgattcaagattggacatggtctcctctgattatcaggtactggggctgagggcattaaaaatagtaagcctccttcctcgtcccctgcctcaagaaattgcctccttatttatcaacatctttttcctccctttccctgagagctcacagtacaatgtttgtttcagaagccccatttgcacaggttttcagcaactcagaatgctctacttctttttctttgagaaaggattgagatacgctcctgctgtgcccccatctttcctccaaactcctgcctgtgtttgtgtggatacccagtcccagaaccacactgttgagttggacacactgtaaacccctggctaactgtcaagtcatgatgcagacttcaggttgttctgtataaaatgcaaaataaatgttttaattaacaatgaaaaaaaaaatcctcaaagcaatagtgttgagaggtgggacctttaagaggtgattcgatcactggagtgggttcgtcattgtgggaatggatttgttataaaagtgagattggaggccaggcatggtggctcacacctgtaatcccagcactttgagaggctgaggtgggtggatcacttgaggtcaggaggttgagaccagcttggccaacatggtgaaaccctgtctctactaaaaatacaaaaatgagctgggcgcggtggcggacgcctgtaatcccagctacctgggaagctgaggcaggagaattgcttgagcctaggaggcagaggttgtagtgaaccaagatcgcgccattgcactccagcctggggtacagagtgagactctgtctcaaaaaaaaaaaaaaaaaaaaaaaaaaaagtgagcttggaggccgggcacagtggctcatgtctgtaatcccagcactttgggaggccaaggcaagcagatcacctgaggtcaggagttcaagaccagcctggccaacatagtgaaagcccgcctctactaaaaaaaaaaaaaaaaaaaattacccaggcatggtggcacatgcctttaatcctagttactcaggaggctgaggcaggagaattgtctgagccagggaggcggaggttgcaatgagccgagatcgtgccactgcactccagcctgggtgacaggacgagactccgtctcaaaaaaaaaaaaagaaaagtgagattgggctggacacagtggctcacactagtaaccccagcgcaaggcaggaggatccttgagcccaggggtttgagaacagcctgggcaacatagtgagactccgtctctacaaaaaatttaaaaattagctcagtgtggtggtatgcacctgtagtcccagctactcaggaggctgatgcgggaggatcgcttgagcctaggagttcaaggctgcagtgagttatgattgcaccactgcaccccagcctgagagacagagcaagaccctgtctctgttttagagacaaatacatgtctctaatatatatataatatatgaaaatatatatcatatatatagatacatacatgaatatatagtatatatttatagtatatctatgtatagtgagaccccatctctacaaaaaagaacaaaattagctgggtgtggttgtgtgggcctatggtcccagctactcaagaggctgaggcgggaggattgcttgagcccaggaggaagtcaaggctgcagtgagccaagattgcaccactgcactccagcctgggcaacaagagtaataacctgtctttaaatttttttaatgtaaaaataaataaaaatttaaaagaaaaggctggccaggtgccatggctcacgcctgtaatcccagcactttggaaggccaaggcgggtggatcgcgaggtcaggagatcgagaccatcctggttaacacggtgaaaccctgtctctagtaaaaatacaaaaaattagctgagcatggtggcatgtgcctgtaatcccagctactcgggaggctgaggcaagagagtagcttgaacccaggaggcggaggttgcagtgagccaagatcataccactgcactcctgggtgacagagcaagactctgtctgaaaaaaaaggcaaggcaaggcagggaagggcagggaagggcagggaagggcagggcaggcaaggcagggcaaggcagggcaaggcagggcaaggcagggctgtttggggcttcccttgctctctggcgtgtttctcttaccagatgatgcctgcaccacgtgataacacagcaaggagaccctcgccggatatggcccaatcttggacttcccagcctccagaaccacaagccaaataaacttcaattgtttatagattacccagcctgtggtattctgttaccacaaagcagaaagctaagacagttgtttctctgaaatttgaagttaacggggtgcctggatgtgtatttgctaaacctgatccccctgtgatgaagcctcccacatcacaaaaaaaatcttagaaatttaaaacttagccaggtatggtggtgcacacctatagtcccaaactcaggaggctgaggcaggagaatcccttgagcacagaaggtcaaggctgcagtgagccatgatcgcaccactgcattccagcctgagtgacagaacaagaccttgtctctgtcttttttttttttttcagacagaatcttgttctgtcgcccaggctggagtgcagtggtgcgatctcggctgattgcaacctctgcttcctgggttcaaatgattctcctgcctcagcttcccgagtggctgggattataggcgtgtgccaccatacctggctaatttttgtatttttagtagagacagggtttcaccatgttgagcaggctggtcttgaactcctggcctcgagtgatcagcccgcctcagcctcccaaagtgctggggtgacaggcgtgagccactgcgtctggccttcacctttctcttttatccttacttttatttttttttagaccggatcttgctctgtcgcccaggctggagtgcagtggtgcgatcgcagctcactgcaacctggacttcccaggtgcaagtgatcctcctgcctcagcctctcgagtagctgggactataggtgcatgtcaccgtgcaaggctaaaactttttttttaaagagatgggatcttgccatgttgcccaggctggtctcaaactcctgggctcaagcgatcctcctgcctcggcttcccaaagtgttgagattacaagtgcgagccaatgcgcctggccttatcgttgcttttgaggtgagaagatggaggtccagcatccagggccagatttgagcccactgggtcctttgtctctagccttagtagcactggccatgaaatgggactttagccaactgcaggtgaccaagagccaaccttgcatctcaggctgctgggcccctctgagctcagccccgggggcttgttgcaggaaggcccctcacttttatttatccccccacccccactgtatatgtaactgtctgaaactcactgttaaccccataaggaaaaatgtgctggctgggcaccatggcttatgcctgtaatcccagcactttgagaggccgaggtgggaggatcacttgaggtcaggagttcgagaccagcctgggcaacatggtgaaaccccgtctctactgaaaataccaaaatcagccgtacatggtggcatgtgcctgtaatcccagtgtctcaggaggctcaggcaggagaatcgcttgaacccgggaggcaggggttgcagtgagccgcgatcacacgactgcactccagcctgggtgacagagtgagaccccgtctcaaaaaaaacaaaactcattcaactgtactttattggatataagttacaccttaatacacttgactcaaaatttatgtatttaatattttattttgagaatgtgagaaaaaaaaaagtaacgtaagaataaaatccaggccaggagtggtggttcacacctgtaatcccagcactttgggaggtggaaggatcacttgagcccaggagtttgagaccagcctgggcaatgtagggagaccccccatctctacaaaaaaaaattttttttaattaaccaggtgtggcggtggacactcagaatgttacagaatggttcttgtgactaggcctttagtcacagctacctgagaggctgagatggaaggatcacttgagcccagaaagctgagcctgcagtgagccgtgatggtgccactgccctccagcctgggcaacggagtgagaccgtctcaagaaaaaaaaaaaaaagaaggccaggcgtggtggctcacgcctgtaatcccagcactttgggaggccgaggcaggtggatcacctaaggtcaggagtttgagaccagcttggccatcatggtgaaaccccatctctactaaaaataacaaaaattagccggacatggtggtgggcgcctgtcctaccagctacttgggaggctgaggcaggagaatcgcttgaacccaggaggtggaggttgcagtgagccgagatcacgccattgcactccagcctgggtgacagagtgaaactctgtctcaaaaaaaaaaaaaaaagaaaaagaaaaagaaaaaaattcaaatgctttatacaaagtcttctgttttggaaaactcgtgttattagttccagctctggaatgatgaagagtggtctcttgctacataccctagctatccagatgtgtctgttcatgttctttttcttgcttcaaaataaaacacatctgtgttttaagttacaagtattaacttgctatattcaaagaattcatgaaacatatgtgagcataccattaaagaaacacagaaaaaaaggagaaagcagtcaatttatttatttattatggagacagggtctcagtctgtcacccaggctggagggcagcggtgcaatcatgactcactgcagcctcgacttcctgtcctcaagcgatcctcccgccttagcctcccaaagtgctgggattacaggaatgagccaccacacccagccttaaagcagtcagtttagaagtggagatagtatgggttacagccatactgaatcaggcaccatggctccggttccatgcgtaatagccctggaactatcaatctggataaaacagtcctttttatttattttttttggtagagatgggatcttgctatgttgcccaggctggtcttttttttttttttttgagatggagtctcgctctgtcgcccaggctggagtgcagtggcatgatctcagctcactgcaagctccgcctcccaggttcacgccattctcctgcctcagccgccccagcagctgggactacaggtgcccaccaccacgcctggctaattttttgtatttttagtagagacggggttttaccatggtctcgatctcctgaccttgtgatccgcccgcctcagcctcccaaagtgctgggattacaagcatgagccaccacgcctggcctgcccaggctggtcttgaactcatgggctcatgcaatcctcctgcctcagcctcccaaagagctgggattacaggtgtgagccatggtgcccatcagtctgagacatacagatgcgtgcctcagtttcctcacctgtacaatgaggttcatcacccccttgcacatggggtcattgtgaggacagggtgggttgggcctggtgcagtgggcattgtcagagcgggagaaataagtcccaggttggatttagtgtcttttgtcttctcagctgtgttcatttgttttacactggtgtgagccaacctaaagtctcactctgacatcttgtcatcatccaaatggccaactgctaatcatcaagcacttccctgccagcgcagcgaggcagcagcagtgatgtcccaggatcagccagttcctggtcacatctcattgcacacctgcccctttgaaatgtccagtcctggggctgcttagattctagaacaatcttgggagcgaggagcccaggccagggtggcatcctgtggtcttgatcccaataccatgctgttccagggtcacttggaagctggactcagtatcccagtcggggagctggtggctcaggcaaagggacgcagaggagccctgttgcagactcagcaatgtggccctaagggagctgggtgcagcgcagtggcccacgcctgtcatctcagcactttaggaggccaagtgggaggatcacttgagcccaggagttcgagactagcctgggcaacatggcgaaacctcgttgctacaaaaatacaaaatagagccgcgtgtcgtggttcgcccttgtaatcccagcactttgggaggctgaggagggtggatcgcctgaggtcaggagttcgagaccagcctggccaacatagtgaaacccccctctctaataaaaatacaaaatattagttgggtgtggtggtgggtgcctgtactttcagctacttgggaggctgaggcaggagaattgcttgaacccaggaggcggaggttgcagtgatccaagatcatgccactgcactccagtctgggtggcaaagcgagactccatctcaaaaaaacaaaaaaattagccaagcatggtggcatgcacctgtgatcctagctactcaggaggctgaggcaggggaatagcttgaacctaggaggtggaggctgcagtgagccatgattgcgccactgcactccagcctgggagacagagtgagaccatgtctttaaaaaaaaaaaaaaaaaaaaaaaaaaaaaagcagaaatagcagctgtgagaaaatatagtagaatcaggaacgtagtggagaagaaatcatctggtgccatggaagttcaggacagacccctgcatcaagaaagaggagactgtgccactgcactccagcctgggcgacagagtgagactccatctaagtaaaaaaaaaaggttgggcacggtggctcacgcctgtaatcccagcactctgggaggctgaggtggatggatcatgaggtcaggagatcgagaccatcctggctaacacggtgaaaccccgtctctactaaaaatacaaaaaattagccgggcgtggtggcgggtgcctgtagtcccagctactcgggaggctgaggcgggagaatggcgtgaacccaggaggcagagcttgcagtgagccgagattgtgccactgcactccagtctgggcgacagagcaagactctgtctcaaaagaaaaaaaaaaaagaaaagaaagaggaataaaggaatcaaaaagtgtttccaactctgcagggaaagacacaaactgtattaagagagattaatgatgcaagatggatgtccaggacacacctgctgggagccacagtggcttaactccactgtctgtggggacttggaggtcatggcaagcacagcagtgaaattcctgcaccaggagggggcccgggccatggatgaggagttgtttcatgagtaccagcatggcccaacttacagaactggctggactcagctgttccactgtcattgccaaggcatatcctcccatatccatgtcccgatcatccatggcccagggaataatggagaaggtagcctgctctgtgcttgacacctcaaacattttggtcaccagccaatcatctttgaccccaaaagacccaacaagccactctacactatgcttggtgacccactgtcaggaaaggggcattcttttgcttggtgaagtgcccccagagcccacgctgatcaatgagctgtatgggctgggggtggatgccatctttggcttcagcttcaagggcaatgtttgaaagccattctgtaacattctgagtgtcctgaatagactcactgtgccactgccaatgctgacattcccttgggatgggacatggagaaggaaaactccggagggatccagccagacctgcttctccccctgatagcacccaaaaagtctgaaacctagtttacagattgctaccactacttgaggggttgttgactaccacctgcttgggaaaagaagtaccagctaaaacctgccattgtaccctaaccctgagtatgtctcatcatctgcagtgaaggaaggtggatggacattcttcccaataaagacttagtgcctctgtctcccagaaggcacacacacatacacacacacacacacacaatgcggagagagactactgaggctaaagagatggtaggcataccatgttcatggacaggaaggctgaggttcataaagatgctgattaactcatttaacagtcccaacccaccagaaggaaccaatcttgcagagaccttgatttcagacttctagcttccaaagctgtgacagaataaacatattaaattaatttccccctctgtagtttcaacacagtcccaatgaaagtcatgtcagagctttccctggaactcaatatgataaccgaaacatttaactggagcagcagagggttgcaaatagttgggacattactgcagaagaacagggcagtcctacctgacataccagatattggaaccatgacaaagcctgtaattaagtcagcaaaatactggcacagaaagaagcacattgaccaatggattagaattaaatgcccacagacagccctatgcaggtcaggaattttgcttcaagaaggagagagtctgtcccagcagtggggaggggaggctatcccataaaaggatctgggaaatgggagaccatgttgaaaacaatattggttctctacttcacacaatatgcaaaacaaaactccacatgggttaaggagttacacacaaaaatataacaaaattaacctttttattttatttttttagacagggtcttgcttggtcacccaggctggagtacactcactgcagcctcaaacttacaggcgcacattaccacgcctgactattctttttaaattttttttgtagagacagggtcttgctatgttgcacaggctagtcttgaactcctggtctcaagcgatgctcctgcctcagcctcccaaagtgctgggattacaggcatgagccactgtgcctggcccaaaagaaagctttaatgtcttggtggtaaatataggtgaacttgagggcaaggcttggcggctcatgcctgcaatcccaacattttgagaggccaagaggggaggatcaattgagcctaggagtttgagaccagcctgggcaacatagggagactccatctctacaaaataaaatttaaaaattagctgagtgtggtggtgcatcctgtagtcccagctactagagagggtaaggtgagaggactgcttgagcttggaaggttgaggctgcagtcacccatggtcacaccactctactccaggctgggcaacaaagtgagaccctgtctcatagaaaaaaaaaaagagagagagagagaaaagaaaatattggcgaacttggggtaagaaaagactttccacataagagccaatgggcattgtctatataaagaaaagattggttaatttgcatatattaagggtaggactttgtattcatcaaaaggcacattgaaggaagtgaaaagacaagttaccagccagccacagtggtccacatttgtaatctcagagctttgggaggctgaggctggaggaatgcttgagcccaggagttctagaccagcctgggcaacatagggagaccccatctctacaaattaaaaaattagctggacatggaagtgtgtacctgtagtctcagctactcaggaggctgaggcaggagaattgcttgagcacaggagtttgaggccgcagtgagctatgatcatgccactacactccagcctgggccacagagtgagaccctgtctccaaaaaaaaaaaaaaaaaaaaaaagaaaaaggccaggtgcagtggcttacacctctaatcccagtactttaggaggccgaggcaggcagatctcttgagttcagtagttcaagaccagcctggccaacatggtgaaaccctatctctactaaaaatacaaaatttagctgggcatggtggcgggcacctgtaatcccagctactcgggaggctgaagcaggagaatctcttgaatctgggaggcggaggttgcagtgagccaagaccacgccactgcactccagccggaccacagagggagttttcacctcaaaacaaaacaaaaagactagttacaaattaggggaaggtatttgcaatatactcaacagatggaggaatactatcaaacctacataaataattcctataatgccatccaggcacggtggctcacgtctataatcccagcgctttgggaggctgaggtgggtgaatcacctgaggtcaggagttcgggaccagcctggccgacatggtgaaaccccatctctactaaaaatacaaaaattagccaggcatgatggcaggcacctgtaatcccaactactcaggtggctgaggaaagagaatcacttgaacccgggaagcggagattgcagtaagctgagatcatgccactgcactccagcctgggtgacagagtgagactcagtctcaaaacaaaacaaaaagacaagttacaaattaggggaagatatgtgcaatatactcaatggatggaggaatactgtcaaacatatataaagaattcctataatgaacaccacaaagaacacagagtaggaattcacgaaggaggaagcacaagtggcaaagagatgatcaacatttactgaggatcaggaagatgcaaattaaaacaccaggtagatgccatttgattggcaaaagctacaaaatccaccaataccaagtgattccccaagatgtattcatgagaaactcacaaatggctgtgggagggtgcatgctgctgacacttgggaaaaacctctggagtttccaagtgtctctgagtccacaacccacatgctccagaaatccgcaaagagaaataccttcctgctcctggccagagtgccggaggtaagcactaccctctcagacctggaggacctgcaggaggacaggtgagtttttacttggggttggagagggggctgtgtaagtttcctggggctaatgtaacaaatttgcacaacctggggggctccagacaacagaaatttattctctcccagttttggagagaagtctgaaatcaagataattgcctgggttgattctttccagtggtttgagatgtttaaatgagctaatacctggtacacactaaacacttagtaccagtgtactgggagaataataaaatgcaggaatacagcaaagcataaaataagcattgattgttgattggatgagtgattaagactaagtgaagggccaggtgctgtggctgatgcctataatcccagcacttttggaggccgaggagagcggttcagctgaggtcaggggttcgagaccagcctggccaacatggcaaaaccccatctctaccaaaaatacaaaaattagctgggcgtagtggcgcatgcctgtaatcccagctactcaggaggctgaggcaggagaattgcttgaaccctgggaggcggaggttgcagtgagccgagatcacgccactgcactccggcctgggtgatggagtgagattgtttcaaaaaaaataaaataaaataaaaaataagtggaggctgggcgcagtggttcatgtctgtaatcctggcactttgggaggctgaggcaggcagatcacttgaggtaaggaatttgagaccagcctgggcaacatggtgaaaccctgtctctactaaaaatacaaaaattagccaagcgtggtggcgtgtgcctgtagtcctagctactttggaggctgaggctgcagtgagtttgaacctgggaggcagaggttgcagtgagctgagatcgcgccactgtactccagcctgagcgacagagcaagactcttctcaaaaaaaaaaaaaaaaaagactaagtggagatgagggttcagtgcacccccatctcctggccctgctgcccatgagccagaccctgagctgacagattggtgcccatttcctcttatggattgatacggggctcttacctctgggtttgctcagcccagcagcaggcagtcagagccagaagttgtttgcaaaccgaaaccggtctgcggcttgggccacctacttgtgaaaccagctgtcgctgtttttcctccctgtgagaaagtcccccagtaaagctgcgcgggggaggagaaggagggtggaggagggccgagtagcttcctgggagaccttggggtgtggaggcgctgctctggactttggtttgcccatctgcaactgggcaccatggggaaaggggattgcaggctcctggctggggagtttggatttggggatgctggacaagtgacttcacctctctgagcctcagtttccttatctgtgaactagtgagaaacacatggccaccagagctgctgcaaaggggcatgtccctctcttcattcaggccttggccccaaatgtcgcctattccaggaagccctccaggactgcctgatcaggaaacaccctccctctgctgcatctggtcatgtattctactttattcatcacacttttcaacacctgattccacattacagatgcatcgcttcaggtgcataatgtcctctgggtcccacctttgtccccagaccatgagtcctacaagggcaagattgctctcagttgtccccggctgtgtccccagaccacagcccagggcctaaagcacagcaggcatctggggaaacatttctttttatcagcataagattattatctgtgagcacactcattaagccccggctgtgtacaggagccagcgacaccaccatgaatgagatacaaattcttttttttttctttctttttttttttttagacggagtctcattctgttgcccaagctggagtgcagtgtggcacaatctcagctcactgcaacctccacctcccaggctcaggtgattctcccgcctcagcctcccaagtagctgggattggtagctgggactacaggctcccaccaccacacagttaatttttgtatttttcagcagagatgagatttcaccatgttggccaggctggtcttgaactcctgacctcaagtgattcgctcacctcagcctcccaaagtgctgggattataggcatgagtcaccgcgcctggcagagatacaaattcctgatggcagaggagggagagagagtgtgggtgacgatgacaattgaactgagacccaaaggaggtaggggagacatatgggcgtctctgggaagatggtccccgggaaagcacagcctttagacaggccccgaggcaggagcctgtctgactcaccggaggagcttggaggaggctgaggtggcctaagtcgattaagcagggtggggagggaagaggcgatggtgccgtgagaccaagcagggccttgaggtctggggggagaactttggcttttactctgaggaaggtgggagccacagaggcttctagacagaagaaggacaagccggactcaggataccagggtgggggtatctgtgggggataaagggagaagcgaggagaccacagaggggtgccactgctggtcctaaggagcaatgatagtctggaccagggagaagggaccttcatgagaagggatcggatgtgggagcaattttgatggtggatgggtggaggaagaagattcaggggcaccagtgtgagcccatctcacaagggaggaaactgagactctggggacagagggatctcagtaaaggagaaactggaagaaaccagtggaacgttcagaggtgaccagggtccaggagggagcccccgcacctccctgagtcacagagattgccagcttcctcctgatgcaacctgaccttccatctctctctttgtttgtttgtttgtttgttttgagacagagtctcactctgtcacccaggctggggtgcagtggcacgatccctgctcactgcaacctctacctcccatgttcaagcaattctactgcttcagcctccaaagtagctgggattacagatacacaccaccacactgggctaatttttgtatctttagtagagacggggtttcgccatgttggccagggtgatcttgaacccctgacctcaagtgatctgcctgtcttggcctcccaaagtgctgggattacaggcgtgagccaccgcacccggcctctctttgattttatctctataatttccatccctgtcagagggaagaggctccaccacctacagacaccgataggcctgactcggcttcccacagattcatttactaaccccaaaccccaagacatgggtaccaacactgttttacagatggggaaactgaggctcatataggcgaagtggttttccaggcagaggcaggattagaaccctgagccttggctctagacccctgctcttgagatggcactctgctgggggtcatcaaacattccaccccgagatgcattattcctttcccagcttctgagaacttgggcttgggtgggagccccctgcaacgtgctaaaaatccaggtttaggcatttttttaatgtaaaaaaatatttacttatcatccaggcacggtggcttacgcctgtaatcccagcactttgggaggccgaggtgggcagatcatttgaggtcaggagttcaagaccagtctggacaacatggcgaaacctcgtctctactaaaaatacaaaaattagccaggtgtggtggcgcacgcctgtaatctcagttactacagaggctgaggcaggagaaatcgcttgaacccaggaggaagaggttactgtgagccgagatcctgccactgcactccagcctgggcaacagagcaagacttcatcacaaacaaatgaacaaacaaaacttatttattttctagaaacagggtctcgctctatcacccaggctggagtacattggcatgatcatagctcattgcagcctcaaactcctggactcaagcgatcctcccacctcagcctccctgagtagctgggactacaggcacctgccaccatgcccagctacattttttcaattttttggagagacaggatcttactacattgcccaggctagtctcgaactcctgggctcaaacaatcctacagcctcggcctcccaaactgctgggattacagccttgagccaccaaccttggccagatttagatttgtatggccttacgtttctgagtttgtaagattatatacgattcatttgttcattcatgttcattcattcctggccacatccaggtgcctgccttatttggggtaatgctcgaggccccagcttgggaaggtccaggctggatagagatattcttgttcccacagggtcaaggctaggctggagggaggtacccagggctgggggtccccagcgatccaggaagtggggggcttgctgaagaagggaacctcatgccaaaggcctgggtcccttcctcctcatgcccaccacccccatgacgaaagccagagaggatgagggcaatgtggggcttccataccccaaatatgatcctggtgcctggtatggaaccccagagcctgccaccgtgtctctagtgatccttgaaaagttccagcatattttgggagtactcaacaccaacatcgatgggtggtggaaaatagcctttgctatcactgccattaaaggtgtggatggaagatacgcttatgtggtgttgaggaaaacagacattgacctcaccaagagggcgggagactcacggaggatgagatggaatgagtgatcaccattgtgcagaatccacagcagtacaagatcccagactggctcttgaacagacagaaggatgtaaaggatggaaaatatagccaggtcctagccagtggtctggacaacaagctccgtgaagacctggagcaaccgaagaagattccggcccatagagggatgcaccacttctggggccttcatgtctgaggccagcacaccgagaccattggccgccatggccgtacctgtaccgtgggtgtatccaagaagaaataagtctgtaggccttatctgttaataaatagtttatggccgggcgcggtggctcacgcctgtaatcccagcactttgggaggccgaggtgggcggatcatgaggtcaggagattgagaccatcctgctaacacggtgaaaccctgtctctactaaaaatacaaataattagccaggtgtggtggcacacgcctgtagacccagctactctggaggctgaggcaggagaatctcttgaacccggaaggcagacgttgcagtgagctgagatcatgccactgcactccagcctgggcgaaagagcaagactgtcgcaaaaaaacaaatagtttatataccaaaaaaaaaaaaaggaagaggaaaaaaaacctgagcccaaagcctagccctaaacgtcacctccggtccccattcccggcttgcaccgggcagcagccaacaccacggggaagtggcctgggcttcccgccagactgcctgctggaaaactagctctgggaggtgggggtgtcaccatccagtatgtgagggtggaaccttctgggctgaccatttatgggacaggcccctagaatgggaggcccaggacagccggagagccacagagcccagcagctggaccagggtgaccatgatgccactggggctgggacacctgcacgagactcttcaggaataagcccctatttccccacctaaaaatggaagtggggccgggcacagtggctcacgcctgtaatcccagcactttgggaggccgaggcgggtggatcacttgaggtcaggagttcgagaccagcctgaccaacatggtgaaaccccgtgtctacaaaaatacaaaaattagccaggcatcatggtggggggcctgtaatcccagctactcaggaagctgagggaggagaatcacttgaactgggaaacagaggttgcagtgagcagagattgtgcccctgccctccagcctgggccacagagcgagactctgtctccaaaagtaaaaaaagagacaaataaacagagaaacaaggagagacagaggcagtgagagacagagacacagagagatacacagggagacacagagacaggtgaaacagagacagagagagatgagacagaaacacacagagagacagacacagagaaacagggaaagagagaaagggagacacagggagacagagacagagagacagaagtgagacagagagatgagacaaagagacagagagagagacagggagagagatgagaaatgagataaagagaaagatgacacaaatattttgggaggctgaggggggaggattgctggaggccaggaattagagaccagcctgggcaacataatgagacccttatctctacaaaaagaaaaagaaaaaaaaagatggcaaagaaagagacaaggagagagacagagagacaaaacacaaagatagagagagaggggcacagggagaaagagacaaagaggggcaagacaagccaggtgcgatggctcactcctgtaatccaagcactttgggaggccgaggagggcggattacctgaggccagagagttcaagatcagcctgaccaacatggtgaaaccccgtctctactaaaaatacaaaaattagcatagtagggtggcgcacgcctgtgatctcagctacttgggaggttgaggcaggagaatctcttgaacctgggaggtggaggttgcagtgagccaagatcacgccattgcactccagcctgggcaatagagtgagactctgtctcaaaaaattaaaaaaaaaaaaattaaaaaaaaaaataaaagcaagtcagagaaatagagacagagagacaggaagagatgagaaatgagagatagggagagacagggagggaggaaggaaataggaagctgggggtggggccaggacacagtggctcatgcttgtaatcccagcactttgggaggctgagatgggaggactgcttgaggccaggaatctgagaccagcctgagcagcagagtgagtgctctttctacaaaaaatacaaaaattagctgggcttggtggcacacacctgcggtctcagctacttggaaggctgaggtgggaggattgtttgagcccaggaggctgcagtgagctatgatcacaccactgcactccagcctctgggtgacagacagagacagtgtctcaaaataaaacaaaatgaaaattagccaggcatggtggcgggcacttgtaatcccagccactcggaaggctgaggcaggagaatcgcttgaacctgggaggtgaagattgcagtgagccgagatcgcaccagcctgggaaaggagagcaaaactccgtctcagaataataataaaataaaataaagatcactcctgtttagttggttaagaagaaaaaaaaaagaggttaggggtacaagaccagccactgggagaagagggccctcctacccggccagaggagccccctgcctggagctcctgatcccagcacataaggtttaatattattaaaggtgatgatatcttggagggttgggcacctcgttcacctagctccttctcacctctcataggcctccccggggggttaactaccccattgcaccgatggggaaactgaggctcggagaagccctggctgcacaggcagttggaagcagagccaggactcggctggatccttgagacgtttgtcgactgactgtgtgacccttggcccctccagtctccaacccggaggagaaacccgcccctcttcccgtcccccacccccagcccgcccggcgggtgttttttttttcctcctcctgggtattttggtttcggcaggaaccgccccggggagcaggcggttcccgctggcagggtcagcccagggcggggacgggagccaggagcagctccaggccagggaaggtggggaggactcggggaggaagcctggccgtggccccgaccactgggaccaggcaggtcgcgtccccatcccaatcttccggtgcctcagtttccccacctggaaagcggggctctgcgtgatcgcggcacagcccgtggaggcgcgtcgcgcatggggccgggcggggtttccacgtctccgccaaggttctgtccactcagttattaaacattgatggatcggggacagagccagaggccagtgccccaaaccggggcgggaggtggggaggggaggaggggggagggacaggccagaggtgggggctgggggcggggaggatggggagaggtgcccgcaagaggggtttatcaagatcaggaggattctcaggtagcacacccaaagcacaagccagcaaaggaaaatagatcaacccgactccacacaatgcaagacttttcttctgcaaggccactattaagagaggcctggcacagtggctcacacctgtaatcccagcactttgggaggttgaggcaggaggatcgcttgagtccaggagttcaggatcagtctggacaacatagtgagatgagaccttgtctatacaaaaaatatttaaaaattagccaggtgtggtggtgtgtgcttgtatagtcccagctactggggaggctgaggtgggaggatcgcttgaacccaggagttcgaggctgcagtgagctatgattgcgttgctgcactccagcctgggcaaaagagggagactctatctcaaaaaaaaaaaaaaaaatgacaacccacagaatgggagaatatatgtgcaaattttgtatctgataagggtcaaaaagataaataatccagtcagacatggtggctcacgcctgtaatcccagcactttggaaggctgaagcgggcagatcactcaaggtcaggagttcaagaccagcctggccaacatggtgaaacattgtttctactaaaaatacaaaaattatccgggcatggtggctaacgcctgtaatcccagctacttgggaggctgaggcaggagaatcgcttgaatctgggagacagagattgtggtgagccaagataacgccactgtactccagccttggcatcagaacatcaaaaagaagaagaaggaggaggaggagaaggagaaggataagaagaaaaaggaggccaggcgcagtggctcacgtctgtaatctcaacactttgggaggctgaggtgggagggttacttgagctcaggagttccagaacagcctggccaacatggtgaaactctgtctctagtaaacatacaaaaattagccgggcatggtggcaagagcctgtaatcccagctacttgggaagctgaagcacgaggatgatcgcttgaacccgggaggcagaggttgcagtgatccgagatcacgccactgcactgcagcctgggtgacagagtgagatcctgtctcaaaaaaaaaaaaaaaaaaaagaaaagaaaaaggaaaatagcaagtgttgatgaggatgtggagaaatttgaacccccatgccttgctggagggaatgtgaaatggtacagctgacgtggaaaactttggcagatcttccagaagttaaacacagaattaccatatgactctgtgattccactcctagatgtatacggagaaaactgaaaacaggtgtttacgccaaaacttgtacacaaactctcagagctgcgctatccacaatagccagaaaatggaaaccaccgaaatgtccattgatggctgagtggataaataaatagtgacacatccacacaatggaatgctattcagccatcaaaaagaacgaaaccctgacacacactataatgaggatgcgtttcaaaaacatctgagtttctttcacaaaagaacagacagaaaggccacatattgtatgatttcattgatatgaaatgcccagaacaggcaaatccatagagacaggaagcagattagtggctgccaggggctgggggaggggaacggggagtggctactgatggcacaggttttctttttggggagatgaaaatgttctagaattaggtatgagtgatggctgcacaaccttgtgattgtacaaaaaccactgaattgtacttttttttttttttttttttgagacagggtctcactctgtcactcaggctggagtgcagtggtgcaattacggttcactgcagcctcaacctcttgggctcaagtgatcctcctgcctcggcttctcaaaatgctgggattgcaggcatgagccaccacgctcagtgtcaactgtacactttaagagggtgaattgtatggtgtgtgaatgtatcttaaaaaaggaggaatggccgggcgcagtgactcacgcctgtaatcccatcactttgggaggccaaggtgggcagatcgcctgaggtcaggagtttgagaccagcctggccaacatggtgaaactccgtccctagcaaaaatacaaaaattagccatgcatgcttggtggtaggtgcctgcagtcccagctactccagaggctgaggcagaagaattgcttgaacccaggaggtggggttgcagtgagccgagatcacgccactgcactccagcctcctgggcgacagagtgagattccatctaaaaaaaaaaaaaaaaagaggaataaggctggggctcagtggctcgtgcctataatctcaacagtttgggaggctgagacaggaggattgcttgagcccaggagttcaagattggtctggacaacatagcaagactctgtttctactttaaattttttttttaaatgaaagaaatgagttaaaaaagagagagagagaaatgggcagagggcagagttggaagaagggccttcctgggcagagggcctggcatctggggcacagataataaagtatcaggggccaggccaggggctaccctgagtccaggggtcatctcctgcagctcatggttcccagaaacctgacacctcagtcccatcccggctgaagggcagaggcagagacaacatctgtttctgaccaaacccagaggctactggagagatagagaaggaaggtacctgggaaggtaaactgaggcagcctatctctctgatggagacacgcttcccacccagtaggtgggagccatggagaagggaaaagatggatcaggaaagacagagacagaggaggggaggtgggaagaggggcaggggctctggagaggctgcctgaccacatccattttatggaccagaaaactgaggcccacaagatgaatcacttactcccagctgaactgcagccagaataaactctgaacctctcacccgtcaggacctgactctccagctccaggaccccacaacccaagaataaaaccctagcccgccaggcgcggtggctcacgcctataatcccagcactttgggaggacggggcaggcggatcacgaggtcaggagatcgagaccatcctggccaacatggtgaaacaccgtctctactaaaaacagaaaaagattagccgggcatggtggcgggcgcctgtagtcctagctactcgggaggctgaggcaggagaatggcgtgaacccggaaggcagagcttgcagtgagcctagatcgcgccactgcactccagcctgggcaacagagcgagactccatctcaaaaaaaaaaaaaacctagcccacgggtacagtggctcacgcctgtaatcccagcacattgagaggccaagacaggaggatcacttgagcctaggagtttgagatcagcccaggcaatatggtgagactctgtctctacaaataatcaaataaactaagctgagcgtggtggcacgtgcctgtggttctagctgcacaggaggctgaggaaggaggaacagttgagcccgagaggtcgaggctgcagtgcgctgtggtcacgccactgcactccagcctgggcgacagaacgagaccccatctcaaaagaaaaaaaacagctctggtccatatgcccccagcctcacgtgggctacaacctcttcccccatcccccgtccattccccaccagcaacctcagggcctttgcactccctcttctggcccctctttaccaccttggtcctagcattgcctcctccaggaagccctccctcactggctactcctcacatccccactcatcactcttacggtttctcataactctctgagtgataattagattagtgtctgccttccccacccagctaagagccccttatgaccaggaagatcctgacttgtgcaagatggggcctggtatacagtaggcactcaatgctggctttttttttttttttttttgagacagggtctcaccttgtcacccaggctggagtgcagtggcgcgatctcagctcactgcaaccttgacctccccaggttcaggtgattctcccacctcagccctcagcctcccaagtagctgagactacaggcatgtgccaccaaacctggctaatttttgtatttttagtagagacggggtttcaccatgttggccaggctggcctcgaactcctgagctcaagcgatcggcccgccttggcctcccaaagtgctgggattacaggtgtgagccaccgcgccggaccctgatttcttaaatgaatgaatgaaactgagctgtgaaatgggggctaacaccatcctgactcctggagctgctgggagaagctgaggcaatggctgctctgaggagccctggagtaatagttgcatagcagttgctcaataaataccaggccagggcccagctaagcaaacttgctgggcccattgagaaaaggactccaaatcccttcctattttatagacgggtaagcagaggcccagaaagaacctcctgttggtcattttctagggacagaagaaggactcaaagtggcttcatcaaacagggaactgaggccgggtgcagtggctcatgcctgtaatcccagcactttgggaggccaagtcaggtggatcatttgagctcagcagttcgagaccagcctgggcaacatggcaaaaccttggcaacaaggcttgagcctgaggctgaggctggaggatcactcgatcctaggaagtggaggttgcagtgagccaagatggtgctactgcactccagcctgggcaacagagtgagaccctgtctcaaaaaagaaacaaaaaataaaaaaaaatatttatttatttatttatttatttatttattttttgagacggagtctcgctctgtcgcccaggctggagtgtagtggcacaatctcggctcactgcaaccacccccttccaggttcaagcgattctcccgcctcagcctaccaagtagctgggattataggcgcttgccaccacgcccagctaatttttgtatttttagtagagacggggtttcaccatgttggccgggcttgtctcaaactcctgacctcaggtgatcagcccgcctctgcctcccaaagtgctgggattacaggcgtgagccaccatgcccggcctaaaatattttttaaaaacaggaaccagatggaaaatattgggtttcaggtatggctggatccaggaactaatgcttcatctcggtgctgctgtcctccctgcaggctcctctctcagacaggcatccccacggtaggaaggaaagaggctccaagctccaggcttccctctgtccagctcagtctcccgctagtggaagcagggtgtgcatcttccccatgcactctggcaaaagtcccagctgctgccagtaaacattgcctgtctcctacttctcgcacccaagggactgtgcataggggtgggtttgcagccaactccaggggcctccagggctcacacctgcaatcccagcagtttgggaggccgaggcgggtggatcacttgaggtctggagttcaagacgagcctggccaacatggtgaaaccctgtttctactaaaaatacaaacacattttagctggtcagggtggcgggcgcctgtaatcccagctacttgggaggctgaggcaggagaatcgcttgaacccgggaggttgccgtgagccaagatcgcgccattgcactccagcaacaagagccaaactccgtctcagaaaaaagaaaggaggataaacgctcaagggagggcatgcctggtggagggaacggcttgagcagaagctgggatgtggcagatccggagcggggcggggggcatttgcagaactctgaccagccaccgtgtggctggggcaccgagatccaggcctctgtttccctatctagatgcatcgatggggaaagggaggcccccagaccaaaggggcggggcctgggcctcttgcctcctggccctattggctgccaggggtctctccccgagaggtctcatcctttttttgccacaaaattcagtagttctgggctttttaactcccctcctctgtctgaaaccggaaaagtctgtttagcaaacgcggtgggaggaggcagggcgggcccggccggggaaacgcgcgccgctgttgccacctggtggccatggggagaatctggactacccgctaatcgccagggctggggtgggatttcaggagcccccccccacacctcggctcagaccgcagtggggatcagggggaggcggctgcagaacgcgagggaggtggggcagtgtgggcagaaagagggaggattcagggtgtgtaaggggggcaagggtcctgctgcgagttggtgggcgtgaggaggaaggagcgtgggggcaaaccacggttcctgttaccggagtgcccggctgctccactccccctaggccgtcccttcccctgctcagtcctaacttagtagggttccaagctctcatccggctctgtctcccccggattaggtgctcctggaggagacctagaggaagagattaataaatatatgtggaatgaatgaatgaatgaatgaatgaattccaaggctcgtgttttgagattttgagcaggacattcaagcttcaaacaggaaaaaaatacccaagaggaggctcatttacgatgattttgaacagctgtgtaaggtcattatcaccacccccattttataggggggtgagggtggggtggggggtgggatgggaggaccgtcatttttcccacaaagtttacagcccccttccctatatgcctggatcctccaagctacaagaccccgcaatgctgcagggagcccttgagtccagactccccatccagtgctcctgggggtggatgcccagcccagggtccagggatccatctgagccccccttgcccccattcccagtccattctacgccagaacaggtaaatggcagggtctgctcctgccccacggatgccaggcccagcagggtgcagcagcttccatttcatggcagcatctagggttcccccgcaggatgggtggcaacaggcacggggcagagaggaggcaggtgcactggagcctggaggagctctgggttatttgggtccaaatgtgactcctgtgtgtgctacgtagcctcgggcgagtcactcaccctctctgagcctcaacgatcacatctgtaaagtacaacagtcatggttcctttcagggggtggttgtagggatttggtagggaatcatgtgagtggatggaatgggctgggtatgccataagtgcttaataaccagccgttgtgattgagatagtcgctcttcgtgtctgtaagacaaagtggatgttttcgtttctccctcaggcctccaggccctgatatcccaggagcgatggatgtctagcccccccaccccccgggcagggttgcacccctgaccgtctggcccactgggccccaggaccttggccttgcacctgtctccatcctccaaggacaactctgtatccagggccagctcaggggcaccctcaggtagctctgtcttctcgagaggctcagtcctctcgcctttgtcccaggacatctctaccaccagggcctcctgcagggatgcctcttcctggaagtccactgggttgatccactgccaagtctgcagagggagggtagggccacagctgtgagcagagctctacttcccatccacagcaggatggaacggaccaggtcactgctggttaaattctctaacatcctgagacctggacgggtgcagtggctcacacctgtcatcccagcactttgggaggctgaggcgggtggatcacttgaggtcagcagtttgagaccagcctggagaacatggccaaaccccatctctactaaaaatacaaaaattagctgagcttggttgcgcacgcctgtaatcccagctacttgggaggctgaagcaggagaatcgtttgaacccgggaatcagaggttgcagtgagccgagatggcgccactgcactccaggctgggtgacagagcgagactccatatatcctgagaccgatttgaggatggagtctgccgcactgactcccattcagcccctcttaggaagagcactcccatctgtctttgggaaatttccctccctcttttcacagatggtgtggttgacagtgcagtgaccccacctcagctctagcaatggtcatgtgaccctggccagcccacccatcagacccttccctacccctctggttctagccataggctcagggaagggcatgtgacccaagctggaccaatcagtgatggccctgagacttttgccccagttaatggggaaaatggacaccctgcttccaatcagagaaggctcagcctgcctgcggaagaaccctgaacgggcagctccgagatagaccccaatcgctggattcaggcatatctgaagcccattcccttgggattttttccatcaggtttcctttataataaagccactttgaattctgtttctagtgccaggaaatggacctctgcctgcctgtctttaaaatgggaaggggtatggagcactggttttggagtccttaccttgatgaattgggagagaataaaatgagctaatgcgtaacccttgtccagcatgtgcacccaataaaaagacttggaattagaaaaggcatccttacctccttccctccagggaactcaatggcggagctggcacagggtgtgggcagcggcgggcacaggtgccgtgcggccctggggaggaaaggggaccagtgagaggagctgaggttttttttttttttggagacggagtcttgctctgttgcccaggctggagtgcagtggcgcgatctcggctcactgcaacctctgcctcctgggttcaatcgattctcctgactcagcctcctgagtagctgagattacaaacgtgtgccaccacacccggctaatttttgtagttttggtagagagaggtttcgccatgttggccaggctggtgtccaactcctggcctaaagcgatctgcctgcctcagcctcccaaagtgctgggattacaggagtgagccaccgtgcccggcttgaaagcagctttcaatcagacatgcccaccagtgtcaccgcccctttccatgggaatgaccaaggacccaaaagttactatcccttccctagaaatttctgcataggatcacctgaggtcaggagttcaagaccagcctggccaacatggtgaaaccctatctctactgaaaatacaaaataaatagctgggtgtgatggcacgcacctgtagtcccagctacttgggaggctgagacaggagaatggcttgaacccgggagggggaggttgcaataagccaagatcgtgccactgcactctagcctgggtaacagagtaagactccatctcaaaaaagaaaaaaaaaagaaagaaattttgcataaactgccccccttaatctgcatgcaattaaaagtaagtataaatctgactgcaaaaccgctctcagcggctactctccgcctacagggaagccctgctctgcagaggcagtcacggagctataactgctgcttcaataaagctgttttcttctacctctggcttgcccttgaattatttcctgggcaaagccaaggacccaatctgcgggctaagctccactttagggctcccctgcccagcatcattaccatcgctatggtaacggtaagaggtgtcagttacctgttcaggccaaggtagccaaggacgcccacgagaaggatgctcaggaagctccccagggaggcgaagaagatgagccaatcagaaacctgcacttctgaggtgggagagcgtgggttggcagagggctacctcctgcctcttcctcagggaaggagctaggagggcctggtttctccatgaacttgctgctgatcctggtgcacatgccacgggcttctcactgggagaccacagaacccacctgcccggtagctgtcaagaaataaaggcctggcatgcaggaagtgttcaagactctgtaattccaggccgggcacagtgactcatgactgttatcccagcactttgggaggccaacgtgggctgatcacctgaggtcaggagttcgagaccagcctgaccaatatgatgaaacctgtctctactaaaaacacaaaaattagctgggcgtggtggtgtgcgccggtaatcccagctacttgggagggtgagacagaagaatcgcttgaactcgggaggcggaggttgcagtgagccgagatcgcatcattgcattccagcctcggcaataagagggaaaatctgtctcaaaaagataaaaaaagactctgtaattccaggagcctgcacatagggcacatgtggctgcccctggacccaggcctgcctgccccccaccaaccctgactcttttgttctctgggttccagttggttctcttggaactgaaaggacaccgtggcatgaacagggatcatttgatctctgaatctcttataaccatgcacccgacaacagagcctgtgttgttctcttcctcctcctcctcctcctcctccctcttcttctattcctcttcctcttcttcttctttcttctccttcttcttcttctatttttttttttttttttttttttttttttttttttgagacagggtcttgctccgtcgcccaggccagagtgcagtggtgcagtcacggctcactgcaaccttgaactcctggtctcaagccatcctcccacctcagcctcctgagcagctgagactacaggtgtgcaccaccacaccccactattttaaaaatattttttgtagagatgaggtctcaccatgttgcccaggctggtcttgaactcctcggctcaagcaatcctccagcctcagcctcccaaagtgctgggattacaggtgtgagccaccacaccgggttttgcctgtgtcctccttatttttgcattcatttatttgtcgctcaatgaacagattcctgcatcttcctcctccccaagagcccccagataccttgacacatctaccccaaccccgcagtgtcagaccagggagaagggacagttgtaaacaagggcatggccagaaggaggcagagaagtcttgctggaggagggaacttttgagctgagttttgaaggacgaataggagttggaccgtgtggaaaacaaacattccaggcaggaggcagggaagggcctgcatgggcaaggctcctggagtgtgagaggaagctgcgagagaaggcaatgggagcagtttgagctgctactttctcctgagggcagtagggagccatagagggagtgagagtgagggcagggctgctaagatcattgtgggaagcgcagtgcagtgcatgctgggtaaataactgggtcctaccccctccactcaccgatgctgaagcgctggggctggctccagacacccctcagccacgctgtgtctgctcgcacctgcaccgtgtaggctacaccagcccgcaggccactgagggtaacttgggtctctgtgggctgcacgggatgctctgcagtgggagaggcaaccctgagtcctgggacctctttactcctcagaggccaggctgggctaccacagcctgtgggtggggtggggattcataggcattttgctaaaatctctactctttctttctttttttttttttttttttgagacggagtcttgctctgtcgcccaggctggagtgtagtggcgccatctcggctcactgcaagctctgcctcctgggttcacaccattctcctgcctcagcctcccgagtagctgagactacaggcgcccgccaccacgcccagctaattttttgtatttgtagtagagacggggtttcactgtgttagccaggatggtctcgatctcctgacctcgtgatctgcccacctcggcctcccaaagtgctgggattacaggtgtgagccaccaagcccaacctaaaatctcttctcttaatgcgcccattcatctcaagattttttttttttttgagatggagtctcactctgttgcccaggctggagtgcagtggcacaatctcagctcactgcaacctccacctcccaggttcaagcgattcttgtgcctcagcctcctgagtagccgggattacaggcgcccaccaccatagccagctaattttttgtatttttaatacacatgaggtttcaccatgttggccaggctggtcttgaactcctggcctcaagtgatccgcccgcctcagcctcccaaagtgctgggattacaggcgtgagccaccgcgtccggctgacttgttggatctttgggcaggtggatctgaggttggaggcaggattggactctggaggcagggcttggacacaggaccaaactgaggactagctaaagcaggtcctgggctttccataagacacgcccaccagtgtgccatgtcagtttaccattaccatggcaacacccggaaattaccgcccctgtccacggcaatgatcccacaacccggaagttactaccttcatcctagatatttctgcataaaccgccccttcatttgcatataattaaaagcgggtataaatatgagacgtagctgccctgcctgtggggcgtccccactctgcaaggagcaggacttctgctgctgctctacacggccacttcagtaaaagtttctgtctaacaccaccgacatgcacttgaactctttcctggggaaagccaaaaaccctcctggctaaaccctgttttgtgggctttcctgtccctcatcagatcccccctccaggccttagtttcctcatctgtggaatggagacagtcatccctgcttgatgagagttcagctgctgctacatgtgaggggcagcttcccatggatgaatccaatacaccataagcacttggctggtgcccacccagccttctccagggtctgcaaggggtgatcgagaccctcaagttcagctgggtgctcatgactaatcccagcactttgggaggccaaggtgggaggatagtttgaggccagaagtttgaaaccagcctgagcgaggccggacacggtggctcacacctgtaatcccagccctttgggaggccaaggcgggtgattcacctgaggtcaagagtttgagaccagcctggtcaacatggtgaaactccgtctctgctaaaaatacaaaaatttgccaggcatggtggtgggtgcctgtaatcccagctacttgggaggctgaggcaagagaattgcctgaacccgggaggcagaggttgcagtgagctgagatggcgccactgcactccagcctgggtgacagagacagactccctctcaaaaagaaaaaaaagaaaaaatcccagcctgggcaatatagcaaggcctcatttctacaaaaaataaaatattaactgtgcatggtggtgtgcacctgtgtttccagctactagggaggctgaggtgggaggatcgcttgagcccaggaggttgaggctgctgtgagctatgatggcaccactgcactccagcctgggcacagagtgagtccctgtctataaaattaaaaaaaaaaaaaaaaagaccctcaagtctaattctcttgtttttgttttttgtttgtttgttttcgtttttgttttttctgagacagagtctcactctgtcacccaggctggagtgcactggtacaatctcggctcactgcaatctccgcctcctgggttcaagcgattctcctgcctcagcctcccgtgtagctagaattacaggcatgtgccaccatgcccggctaattttgtatttttaggagagacggggtttctccaagtttgtcaggctggtcttgaactcctgacctcaggtgatccgcccgccttggcctcccaaagtgctgggattacaggcgtgagccactgcgcccagccaattctcttgttttaagggtttgataaccaaggcccagagaaggacggcaaggtgcccagggtcacacagcaagagagatcacaggccaggatcctcccttcctccccaagccaggtctgcactgcctcacgtacctgacacctgtttgctgtcttcatctcggcagcggacaacatactcctttaggacgccgggacaggtgctcagcagggatggtgcccagtccacagacacagagtccaagctatgattcttcaccgagacgtggtgcggtgtcccagctgctgaggctgcaaccagtaccattgtcatagtcaacaccaagaatgctggtcgaggcctggcacagtggctcgcacctgtaatcccagcactttgggaggccgaggtgggtaagtcatttgaggccaggagttcaagaccagcctggccaacatggcaaaaccccttctctactaaaaatacaaaaattagccaggcatggtggcggacacctgtaatcccagctactcaggaggctgaggcaggagaatcacttgagcccaggaggcagaggttgcagtgagccaagatggcaccactgcactccagcctgggcaacagagcaagaccctgtctttaaaaaaaaaaaaaagcccagccacgatggctcatgcctgcaatcccagcatattgggaggccaaggtgggtagatcacttaaggtcaggagttcgagactagcctgaggaacatggggaaaccctgtttctactaaaactacaaaaattagccaggcatgatggtgggcgcctgtaatcccagctactcggcaggctgaggcacgagaatcgcttgaacccgggatgcagaggtttcagtgagccaagatcgtgccactgcactccagcctgggccacagagagtgactctgtctcaagaaaaaaaaaaaaaaaaaaaaaaaaggagtgctggttgagcacttcctgaatgcccagcctcccactgtccagagacggaggtaacattggccacagagtcaggtgagctgggttttaattctggttctgccactcagtcactgtcatttcccttccctgggcctcagttttcttatctataaaatggacaatgctggccgggcgcagtggctcacacctgtaatcccggcactttgggaggccaaggcaggtggatcacgaggttaggcatttgagaccagcctggccaacatgctaaaaccctgtctctactaaagatacaaaaaattatccaggcatggtagtgcacacctataatcccagctactcaggaggctgaggaaggagaatggcttgaacccgggaggcagaggttgtatgattgcagtggtgcaatcatagctcactgcagcctcaaactcctgggatcaagtgatcttaccacctcagcctcctgagtagttgggactacaggcacatgccaccatggctggcaaacttttttctttctgtagagacggggtcttgctatgttgcccaggctgttcttgaactcctgggttcaagtgatccacaagcctcagcctcccaaagtgccaaagtgctgggattacaggggtgagccattctgtctgccttaacagcattgtccttttttttttttttttttttttttttgagacagagtcttgctctgtcacccagactggagtacagtggcatgatctcagctcactgcaacctccgcctcctgggttcaagcgattctcctgcctcagcctcccaagtatctggaattacaggcacccgccaccacacccggctaatttttgtatttttagtagagacagggtttcgccacattggccaggctggtttcaaactcctgacctcaggtgatccacccaccttggcctcccaaagtgctgggattacatgcgtgagtcactgtgcccagcctctatttttttaaattatttaaaaagaaaaaataatgtaaacctgcaggtttgggtcacttaccattgcccccaaagtggtaggtggacaggaccgtagaccacaaggtgagcttctcggggtgcgcagaggcaaagatggtaatgtagtaacacttttcctgccccattgccccagactctcgactccagctgtaggttgctggaaggataagcaaaggccaggccattcagtagattgtgttcccacctctgcacctttgcactggctgtgccatctgccaggaacccccagaaaactcctactcatgtttcaaagcccttgcaccaatatcccctcctccaagatctcttccctatgcaacacccccaaccccatccccatccccctctaacccagcccttactccatggaaccagggcttcttttttttttttttttgagatggagtctcgctgtgtcacccaggctggagtgcaatagcgcaatcttgactcactgcaatccctgcctcccgggttcaagcgattctcctgtctcagcctcctgagtagctgggatttacaggtgcacaccatcatgcctggctaatttttatatttttagtagagacagggtttctccatgttggccaggctggtctcgaactcctgacctctgttgatccacctgcctcagcctcccaaagtgctgggattacaggtgttagccaccttgcccggacaatggggtcaggggttccgtgtccagttctgtctcctcaggctgtgtattcttcaaggaacaggctgaggctgaggctttctggggctctggcaaggcccagagcaggaagcgggagagtgagaggccacctgagcctcacggcccccctttccctaaagactgctcattaatttgccaccagcatctcgcgaactgccaccttccctggcgcggttgaatatttaacaaacaccttgggatgtgagattcattacctgtatgtgtgtgatctgcctggaactgagctcaggatgccagcaagaggttccagacccatatgggtgagaggctccgaacctcaccctgtccctacctctgtatgacattgagtaagcagcaacacctctctgggccttagacacccgctgtgtgccttccctgcaggtttgaacccaccaggacctaaaagggagggcacagaggaggggtaggcgcaggccattccaggccattacccattccagccggatccgggtcttgcggcgcagtcaggctgcaggtggcaaggcccccgtcctggcccacaggctgccattcaatgcaatacgtcatgctctgagcccgggctggccaatacatggtggtcccgttggttccgacgctgatattcagagccactggttctggaaggagaggggagagacgcatcgagacagttgccatctctctccccagtccccttctctggctcctgcagcctctctcccaccctctcgtctatacccctgaccctacagggccaggggtgtctgtgtttggctgtttccctgcactggaggctgccttggggccaggcacaaagtgggtagcagatggcgtttgtttttttttgttttttctttggagacggattcttgctctgtcgcccaggctggagtgcagtggcatgatctcggctccctgcaacctcagcctcccgggttcaaatgagtctcctgcctcagcctcctgagtagctgggaccacaggcatgcgccaccatttcctggctaatttattattattttttggtggagatggggtttcaccgtgttgcccaggctggtctcgaactcctgacctccagtgatccacctgccttggcttcccaaagtgctgggattacaggcataatccgccgcatccagtcagcaggtggtgtttgaatgagctgagtcctcctccagcctaactgctgtctccttgccaggatattcaccatgagagcttcctgtactgccattacacccacttccagccttgtaggcgtctccggctgtggcagatacctggctgcccaccacttgcctagcctaggcggagagtgtgatgcaagactaggcctccctggcctgaccggcgccactggtggtctcatgccaaactcagaagcacgagcacacacccactcagtccctgggcaaatctctcccactccctcccgccagggcgtcttcatgaatgtcagagagatggatactgcttgcaattctggggatagcaacagccgtttattgagtaccaactgcatgtgccaagccaatgctgagagctttacaggcaccatttcactatgatatgggaccaggctgggtacggtggctcacgcctgtaatcctagcactttgggaggtggagatgggtggatcacttgagcccaggagttcgagaccagcctgggcaacgtagagagacacctgtctctacaaaaaataaaaataaaaaattaaccaggtgtggtggtgcatgtctgtagtcccagctactccagaggctgaggtggaaggatcacttgagtctgggagttcaaggctgcagtgagccatgattgcactccagtctgccaacagactgagaacctagctcaaaaataataaaaatagtaggtcggccacagtggctcacacctgtaatcccagcactttgagaggctgaggtgggtggatcacctgagggcaggagtttgagaccagcctgggcaacatggtgaaactccatctctactaaaaatacaaaaattaggctgggcatggtggctcacgcctataatcccaacactttgggaggccaaggcaggtggatcacttgaggtcaggagttcgagaccagcctggccaacgtggtgaaaccccgtctctactaaaaatacaaaattagccgggtatggtggcagatgcctgtaatcccagctactcgggaggctgaagcaggagaatctcttgaatctggaaggcggaggttgcagtgagctgagatcatgccatctgtcacaagaaaaaaaagaaattagatcttaaataaacacagggtcaactctagccttttttctttctttctctcttttttcttttttgaaaaagagtgtagctctatcaaccagggtggagcgcagtggctcagctagtttttgttgttgttctttaataatgcataatagccaggtatgatggcacatgcctatattcccagctatttgggaggctgagggagaaagattgcttgagcccagaagttcaagtccagcctgggcaacatagcaaaactctgtctcttaaaaaaaacaaaccaacaacaacaaaaaactgcattatggatcttgattattgaattttttttttttgacacagtcttgctctttgttgcccaggctggagtgcaatggcacaattttggctcactgcaacctctggctcctgggttcaagcgattctcctgcctcagcctcccaagtagctgggactacagccaccacactcagctaatttttgtatttttagtagagactgggtttcaccacgttggccagactggtctcgaactgctgacctcaggtgattcacctgtcttagcctcccaaagtgctgggattacaggtgtgagccaccgtgcctggctgattactgaatttttgatacacccctaaatcaggcactcctttaaaattttctgcctcgctcctctcaccctggtctagctgaggctcagagtaggtgctcagctctgaggggccctcataccgccctccccacccagaggaggcacctgtgtgggtgtcggcaggaatgtgccacgtctggttcaggccaggaccaaattggttcgaggagatgacagccacgttgtaggcagcacccgagagatagggcatcttccccaggtgcagggtcctggtggccttggccttacacgggcaggacagcatgtggagctgtagtcggtaagtgacctccgtgccaggcgccagcccttgacagccttctggaagctccagctgggttggctgtcaggagtatgaaagacagcttgtgggtacctgatcacactcatcatcccataggcagacagcagggcacagcctatgaagacagacttggacaaaggccacagccaataacatgcatcaaaaattaaaagaataataaacctcaatgctggcaaagctgctgtgagacaggcattcacctcccgcacacatctagcttgagggaggtgggaaattgacaaaacccactgacattcaggaaaacaaaaatgtttccatcttttaacccagttacctcaagcagaaaatttttccttagaaaaggaatttgagaggccgggcacgggggctcacgcctctaatcccagcactttgggaggccgagacgggtagatcatgaggtcaggagattgagaccatcctggctaacacggtgaaaccccgtctctactaaaaatacaaaaaattagcccggcatggtggtgggcgcctgtagtcccagctactcgggaggctgaggcaggagaatggcgtgaacccgggaggcggagcttgtagtgagccgagatggcgccactgcactccagcctgggcgacagagcaagactccatctcaaaaaaaaaaaaaaaaaaaggaaaaaaaagaagaggaatttgagttagaggaacataggaaataaaggatttttgctacagccttatagtaacagcccattagggacctgactaagatgactatggtaaagtcaacgagtggagtatttgtcagttttgtctcaacagagatactccctctatgcctcagtttccctctctgtaaactaatcagactgcacttaatgggttgttttgggacttaaagcaataatctgctacccaggcaaatgcagtcaccattatctccttcctggccttctggcttctgtgcaattcccccacactctgtttctcacacaggagccagggaaagtctgtgaacatctgagtccagtcatgtgcctctcctgctcacacacacactccatggctccctattaccttcagagttaaacccacaatttgcccacttcctgccacctctacatctcatctccctccatctaccacttgctcatcccccgcctaggcttttgcctcctgctccccatcccaggccaccccacagccctgtgacagccccgttacctgctctttcagggtcagccgcctcctcccatcctggcccagctgctccaccgagaatctcacctgaggctgtggggggttttctgcaatcagaaccaaaccaactagacgaattggaaggagagaaagactgatggatgttttctttgtaaatgatggattctccacatttacaaagtgaaaatcccttgctgccccaaattgcagaaaagagaaaaaactgaaggaagaaaaattaacacaatttgcatccccagggataactgccacctgtaatctcatgttgcctaaggttttttgtttgtttgtttgttcgtttgctttttgagacgaagtctcactctattacctaggctggagtgcactggtgcgatctcggctcactgcaatctctgccttctgggttcaagcgattctcctgcctcagccttccaagtagctgggattacaggcatgcaccaccatgtccggctaatttttgtatttttagtagagacggggtttcaccatgttggtcaggctgttcttgaactcctgaccttgtgatccacttgcctcggcctcccaaactgctggaattataggcgtgagccactgcgcctggcctctaagttcctttttgaatgcaaatgtatttctctgcatggttttgttgttgttgctgttgttttatagactagagacagagtctcgttttgattcccaggcttgtctcaaactcctggcctcaaacaatcctctggcctcggcctcccaaagtgctgggattacaggcataaaccacagcgccaggcctttctgcatggtttgaaaccctctcactcattttcctgttgcccaggctcagggcagcagctgtttagtacaccctgccacctgcaggtgacattgtccttgagacaccgtgaggttcagcctgatgattctcacttgataaagccctgtagtgggctgagcgcagtggctcatacctggaattctagcactttgggagaccgtggtgggaggatcacttgaggccaggagttcgagaccagccgggcaaacatggcgaaaccccatctctactaaaaatacaaaattagctgggcgtggtggtgcatgcctgtaaatcccagctactctggaggctgaggcaggagaatcgcttgaacccgtgaggcggaggttgcagtgagccaagatcacaccactgcactccagccagggtgacagagcaagacagtctcaaaacaaaacaaaaaatagcagtaggccgggcgcggtggctcacgcctgtaatcccagcactttgggaggccgaggagggcagatcacgaggtcaggagattgagaccatcctggctaacatggtgaaaccccgtctctactaaaaaatacaaaaaattaaccgggcgtggttgcagacacctgtagtcccagctacttgggaggctgaggcaggacaatggcgtgaacccgggaggcggagcttgcagtgagccgagatggcgccactgcactccagcctgggtgacagagtgagactccgtctcaaaaaaaaaaacaacaaaaaacaacaaacaaacaaacaaaaaaaacagcagcaaaaaaccctaaagtgggtgcagcaagaccggatgccacattgtcagggtttgagcacccatttctccctctgccttatttctaacactcaccaccttgtttctaatacctgctgccttatttctttttccattttattttattattacttttttttttttttttacttttttttgagacagagtctggccctgtcacccaggctggagtgcagtggtgtgatcttggatccctgcaacctccacctcccgggttcaagggattctcctgcctcagcctcccaagtagctgggattacaggctcccgccaccacgcccagctaattttcgtatttttagtagagaaggggtttcaccatgttggccaggctggtctcgaactcctgacctcaagtgatctgcccgcctcagcctcccaaagtgctgggattacaggcatcagccaccacgcccagccccattttattttattttttagagatggggtctcactatgttgcccgggctggtctcaaaccactggcctcaagtgatcctcccgcctcagccttctgagcagctggaactacaggtgtgcaccaccacctccggctgttgccttatttctaatgcttgcccctgttcctgtactcagagtgatcttaccagggggaacgcacacggggctgctccacttgctccaggaacttccttggctccccagctgccgtcgtcggagctggaattcctgggccacattcatctccagggggcagaggcaggactctggggagaggcaggtcgaacatcaggccgtaagaattgtccaggacttggcaccagtcacttaaccatcatgtgcttattgagctccaactgtgtacagagccacgtgctgggtcctgggggctcagcagaagcaggccaggccctgtcctcttagggcctccaggatcacccacgtccatccctgcccctcagttcaagtcctggctgcggccatcccttcggtcgtgaccttggccaaaggcttctcaccccctccaagtcgtgatttgtttccccacctgcaatttggaaagaatccaatactgaactatggggcagggtaagaggcatacaaaaaaattcagcattggacctggcatacagtaggtgctcaattaatgccaatttgctgcagctgttgttgtcattactattattattctcaccagtatcatcatcctgaggtccgcagtcgccctagaataaaaacatattcatatattgttttgcattttggtgctgaaaaatatttgctgttttacaattagttatttatttacttatttatctgagacacggtctcactctgtcatctaggctggagtgcagtggtgcaatcatggcttattgaagcctcaacctcccagggctcaggtgatcctcccgcctcagtctcctgagtagttgggactacaggcatgcaccatcacactcagctaatttttgcatttttggtagagacgggatttcaccatgttgcccaggctggtctcaaactcctggcctcaagcaatcccaccccaactcggcctcccaaagcactgggattacaggcgtgagccaccgcacctcgctaaatttttttaaattaaagaccatacttccagggattatttctatcgttaattactagagaaccttctctaggttcaaaccttctttaggaacatataaagcagtaaaaaattattataactaaattttaaaaattaataattattttactaaacacaatgtgggatcctggattgaatctgggagcagaaaaaagacattcctggaaaaattggtgacattcaaataatgcctggagtttatgtaagacattaacattagaggagtttgggtaaaggatatatgggcgttctctgcaccagtttatatagtaacttttctgaaaatcgaaggttattccaaaagaaaaaatttattttaaaaaattttagtgggagcaaggcgtggtggttcatgcctgtattcccagcactttggaaggccaaggtgggcggatcacctgaggagtttgagaccagcctggcccacatggcgaaaccccgtctctactaaaaatacaaaaattagctgcgtgtggtagtgggcgcatgcctgtaatcccagctactcgggaggctgacgcaggacaatcgcttgaacccgggaggcagaggttgcagtgagctgagatcatgccactgcactccagcctgggcgacagagcaaggctccgtctcagaaaaaaaaaaagaaaaagaaaaaaaccacctcaggggctagagtgggggctggttgggagcggggacagatgcagagatggtgagactgatttgggggtgaaggtgccctggagaggcccgtgtccaccctggacttgggaaacaaactcaccaacttccatgggctgctgggtgtccggtgccggaactgcacctcagcaccaacctggttatccggggtctcccactccatacgcagctgcccggccaacttggacaccttgatgtctcccagaggaggctcatatttaactggaagcagaggtagggattggcgaggggcagcccacacgtatgtgagttaatgggccctgaaaatccaccctgtccagggtaagcaactgaatccctaaatatgaattaggggacacttgcaggtcccagctaagcctggtatattatgatcaaaaagtcaagatttatacacaagccacatacggtggctcaccctgtaattccagtattttgggaggccaaggcaggaagatcacttaagcccaggagttcgagaccagcctgggcaacatagtgagaccccctcatctctacataaaaattagccaggcatggtagttcatgactgtggttccagctacttaggagagtgagatgggaggatctcttgagcctaggaggctgaggctgaagtgagccctgatcacaccactgctctccaatctaggagagagagggagaacttgtctctaaaaaaacaacaaatatggccaggagcagtggctcatagctgtaatcctagcactttgggaagccaaggtgggtggatcatctgaggtcaggagtttaagaccaacctggccaacacggtgaaacaccgtctctactaaatacaaaaattagccaggcatggtggtgggcacctgtaatcccagctacttgggagcctgaggcaggagaatcgcttgaacccaggaggcggaggttgtagttagacaagatcccaccactgccctccggcctgggtgacagagcaagactctgtctcaaaacaaattaaaattaaattaaaatttaaaaataaataatttttaataaagatttatacacaggatcctgttagtgaagataactttaaaatattaacacccattgctggcaaggctgtgaagagacgggcacttttgtaaattgcttgccagagggtaatcaattctggtaagcaatttacaaaagtgcctgtctcttgggggtgatccgcccacctcgggctcccaaagtgctgggattataggcatgagccactgtgtccagccaattctttttttgtttgtttgtttgtttagaactatcagggaaatcgtacttagtttttagatctatttcaaggaacctgacccaaggagagacataaattagcataaaatagtcttgctgcaccgtggtcatacccggcctgattctttttttatatcattgtataaatttaagaggtatgatggtttgatatacatatccatagtgaaatgattactacagtaaggaatttaacatatccatggccaggcacaggggcccacgcctgtactcgaagcactttgggaggccaagacaggaggatcatttgagcccaggagttcaagaccaccctggccaacacagcaagaccccatctcttaaaaatatatatacatatccatcaccttctataattacttttttggtgtgtggtgagaacacttaaaatttttttttttttttttgagatggagtctcgctctgtcacccaggctggagtgcagtggtgtgatctcggttcactgtaacctccataccacaggttcacgtgattctcctgcctcagcatcccgagtagctggaattacaggcgcccgccaccacactcggctaatttttgtatttttagtagagatggggtttcaccatgttggtcaggctggtctcgaactcctgacctcaggtgatcctcccacctcggcctctcgaagtgctaggattacaggcgtgaaccactgcacccagcccttaaatctattcttttagcaaattttcaatatacattatttttaattatagttctctactgtaccttggaactctagatttatttgtgctgcgtaactacaaattgtattcctttgacctacatctcccccatttcctccttctctccatccccggtaaccacagttctactttcggtgcctagatattcgactttttttttttaagattatacatgtaagtgggatgggcgcggtggctcacgcctgtaatcccagcactttgggaggctgaggcgggtggatcatgaggtcaggagatcgagaccacggtgaaaccccgtctctactaaaaatacaaaaacttagccgggcgcggtggcgggcgcctgtagtcccagctactggggaggctgaggcaggagaatggtgtgaacccaggaggcagagcttgcagtgagccgagatcgcgccactgcactccagcctgggcgacagagcgaaactccatctcaaaaaaaagaaaaaagaaaaaaagattatacatgtaagtgagatcatgaaatgtttttgtttctgtgcctggcttacttcactcagcgtaatgtcctccagctttgtccatgttgtggcaaatgacatgttttccttcattcttttcttttcttttttcttttttttctttttttttgagacagtgtcttgctctgtcactcaggctggaatgcagtgacttgatcttagctcactgcaacatctgcctcctggattcaagccattctcccgcctcagcctcctgggtagctgggattgcaggcatgcaccaccacaccaggcaaatttttttggcttttttgtgtgttgctgttgttttttagatggagtcctgctctgtcgccaggcaggagtgcagtggctcaatctcagctcactgtaacctccacctcccgggttcaagcgattctcctgcctcagtctccccagtagctgggactacaggcgcgcgtggccactcctggctaatttttgtatttttaatagagatggggtttcaccatgttgaccaggatggtctcgatctcttgaccttgtgatccacccacctcagcctcccaaagtgctgggattacaggcgtgatccaccgcacccggcaaaatacatgatgtcgagtcatgagaacagataataagaacccaaccaggtcttggcagcattatggctagcagagagaaaccagaagcaatctaagtgcccacgaataggggattggtaaggggaccatgaaagactgctttgtcacaatagtgtttgcgtgacactacgtgaagtgacaatggctagtagtatcaagtcccttgccaagggccaggaatcctctctagctccagccttgcagcctgatggcctctctgggtaaaaaacggacggggggagaacaaggtgctaacctgagttgtagagctgcagggtcacctcaggagacttctctgtctggttcctggcccaggattccacccagagtgtgacagtgtacagcacagacaccccagcctggtcggagaactgcagcctggtggctgagccggcggcgaagtagcagcagcgcccggagctaaggctgcagcaggaaggagggtgtcagtgccgagtctggggtcctagtggaccccacagccgactttgtgcatcacatcccagcatcgtttttttggtgtttgtttgtttgtttggagatggagtttcattctgtcacccaggctggagtgcagtcgcgcaatctcggctcactgcaacctccacctccctggttcaagcaattctcccacctcagcctccctagtagctgggattacaggcacatgccaccacatgcgtctaagttttgtatttttagtagagatggagtttcaccatgttggccaggctggtctccaacttctggcctcaagtgatccgcccacctcagcctcccaaagtgctgggattacaagcgtgagccaccgtgcccagcccccagcatccttttctgtcccttgtacacctcctcccccagcctgggggttccttggagatcagtctgggactggaggggtttgagggaccccagtatctcccagcaaggactgcaccacacagcgaagaaacgaatgaaagggctgggcgcagtgcctcacgcttgtaatcccagcactttgggaggccaagggggggtggatcacctgaggccaggagttcaagaccagcctggccaacatggtgagactctgtctctactaaaaatacaaaaattagcaggtgtggtggcgtgtgcctatagtcccagctactcaggaggctgaggcaggaaaatcactctaactcaggaggcagaggttgcagtgagctgacatcatgccactgcactccagcctgggcaacagagcaagactccatctcaaaaaaagaaaaaaagaaaaaagaaaaaatggatggatggatggatggatggatggatggatggatggttggatgggtggataagtgaaagggtgaagaagaaaaaaggactagagagaccctcatggccacccaccctgggatgcctaccttcactgaccaaccccccaccacaatcctccaactctctcttcttagatgagaaactgaagcccaggaaggagtgttgacccagccaagatcacgcatccgagagtaggggcaccagagggggttgaagcaagagtgggatggtgggtgagggtttgggaatggtagaggggtcctcaccaacaccgcaggaagtggctgaccccagctgtgggaccctcatactgccaggagcactcgtaacgatcactggatatccgatagcatctcaggtccctagggcccgaggccgagcctggaagagatcctgtaggcttgggaacagaccagagtctggaggggtcttcgtgcctaagacaaatctttgtgatgcttacatctttcagcgtcacctcagcctaaaccctccccgcgtccttcctacctcatcccctgccgtctctcacctcaacctattccgaatcctcagcctcctaacttgtcctcacagaggccagatgtcctgccacctctctctctatccctcaccctcctctggtgtttttttttggggggtccccagggccccaactttcctcctctggttcttcaaaacacatcatcacatttgtgatagacatttgtttgcctgttgtctatctcttccactaggctgtggtcttgggaagttagttgagctcatagccagttgcctatgtctagaactgtgtccgcacatagaagatgctcagtaaatcgttatcaaacaaaagaatggacagcgtgtctgcttagtgttcagacccttttcagggtgcattaggagcataaatgttccgacaatatggccgggcacggtggctcattcctggaatcccagcactttgggaggctgaggcaggtggctcaccatcacctgagctcaggagttcaagaccagcctgggcgacatggtgaaacctggtctctactaaaaatacaaaaattagccgggtgtggtggcgggcacctgtaatcccagctacttggaaggctgaggctggagaatagcttgaacctggaaggtggaggtggcagtgagctgtgatcaggccactgcactccaacctgggcagcagaacaagactccgtctcaaaaataaataaatgaaataaatgttctaataatttatcaggttggggggggggcttcaaaatgcttaacaggtactttctcccatgtaccgaccaatctgaacggacacagacaccagccctgagaccatgctagggaagtgataatgttcagagaggcggctggctactccagggcaacttgaacctggtaagaatgggccagcaggtggtggggtggggactcccaagaccacaggcagggctgggtctttggcctggtggtggaggccatgggaggggccgctgtggatggggtcaggcagagccctacataatcctcagccaacaatgaggaactgccccgaacctgagtctgcatccggatatggcgggtcctgaaaacagcactcactggttctgcaggcagctgcaaaggcaatgaagacataatgacattcctggccttgcactgtgtggggagaagggctcagccttggggtctacacccaagtgatcatcagccctcccacccacccactttcccatctatgcaccctcctaccaccacccatccatccatctgcccatgtatttatctgcccatctacccatccatccatgtatttattcatccgtccaccatctacccatccatccacccatgaattcatccattcacccatccatccatccatccatccatccatccatccatgtattcatccatcatccatccaccccaccatccacccatctacccatccatccatccatgtactcatccatccatccactcatctacccatccatctatccaaccatccatgtattcattcatccatccacccatctatccatccatccatccacctcaccatccacccattcacccatccatccatgtattcatccatccatgtattcatccatccatgcacccatctacccatccatccatccatccatccatccatccatccaccccaccatccacccatttacccatccatccatgtatttatccatccatgtattcatccatccatccacgcatctacccatccatctatccatccatgtgttcattcatccatctactcatccatccatctgccccaccatccatccatccacgtattcatacatccatccatccaccccaccatccgtccatccatccacgtattcatccatccatccatccaccccccatccatctatccatccatccatccatccatccatccatccatcaatccatgtattaatccatgcatccaccccaccatccacccatttatccgtccattcgtccattcatccatccatccatgtattaatccatccatccatccatccatccatcccaccatccacccattcacccatccatccatgtattcattagtccatccatccatccatccatccatgtatttatccatgcatccatgcattcattaatccattatccattcacccaaccatccatctatccatctagtcaccaatctatccatctatccatccacgtattcattcatccatacacccacccatccatccatttatctacctaccgatatatccatccagccatccatccatccatccatccatccatccatccatccatacatacatacatgtatttattaattcatccatccattcatttacccacccatccacctgtctatccattcatccaccaccctttagtcctcagaggttgagatgcatatttgggagacactctcgggaggtacccctgcaggaaagaacagtaagaccaacagtctggagggcagagagaagtggaggtgtgcctggggtggcaccagtgtctgaagccagcatggggaaagacagtagagggtgcatggcagggagaggcctgccagggctggcccaggcaagcacacttggcccactagcagtcagggcaattattaataacatttctccaggaggcagcgacctccctcagccactgggatccccgtgccctttgggattgccacagtctgctaggtgtggaactgggtgagagaaggagggggatgccaccatggatgggtcaggaagaccccggcgccctcactcccacaagaaggacctgtcctgagccctgcaggcagattggaagccttgggggagaaggcggcaccccaggaaacagccccaagtgtccaaccttgaggggggaaagatgcttaacacacaaggctctccatccttccatctctctctgtgatgacacagaacccccacccacccacccacccctgagagcctaaagcccatcctccttccctttccctggactgaccactcactgccactatctccaggatacctcgtgggctgcctctcgccccctccctgctgctggtctccagccatgcctggcccctgaaggcgctgggaccttgaggtgtggccagcactgctgtgggcattctacaggcactcagtgcatctcaagagccattgaaaaagtcagcaccccgctgatccccagtgtacagagaaggaaagtttatttattattattattattgagatagagtcttgctctgccacacaggctggaatgcagtgctgcaatctcggctcactgcaacctctgcctcctgggttcaagcgatcctcccacctcagctcctaagtagctgggagtacaggtgcccatcatcaagcctggctaatttttgcatttttagtagagatggggtttcaccatgttagccaggctggtctcgaactcctgacctcaagtgatccacccatcttggcctcccatagtgctggattttcaggagtgagtcaccgtgcagggcctgagattattaaaagtatatgggaaggctgggcatggtggctcatgcctgtaatctgagcactttgggaggccaaggtgagtggatcatttgagcccaggagttcgagaccagcctgggcaacacagcgagacgctgtctctgtaaaaagtatacaccaaaaaaattaaccaggcatggtagtgtgcacctgcagtcccagctactcaaggggctaaggcaggaggatcacttgagcccaggtggtcaaggctgcaatgagttatgattaggccactgcactccagcctgggacacagagtgagaccctacctcagtaaataaataaataaataaataaataaataaataaataaataaataagtaaagtatacggaaggatgtgcataggttatatgcaaatactttaccattttatatcaggaacttgagcatctttggattttggtatctgcagagggtcctggaaccattgccccgtaaatatggaaatgactgtatacattatattatgtatgtctatctattgtaaactacatacataagatactatactatgtatacctattagatacatacttgctttttattccttccttagttttttttctcattgaactccgggaggtggaaaaaatttagtgcatttcacagaagagaaaatctagaccagaggaaagatgtctaagttcgatcccagaagccatgactgcccatctcccatttgacagcaggaaagactgaggcacagagagatgaaaccaacccacacagcaggcccacagctctccacacatacacgtgcctccacccagcaagaggagccgccatgccagggtcaggggactcaccgccctgcctggacagcaggaagaggaagaggagggggaccacccaggtcaccagcggctccatcggatccacgtagagccccacagccccaggggagcctctctgccacctgcgaggttcagccaccccgtccccactccggaacacattgaagctgagcaaggagaaaagactgaaaaaaaagaaaaaagaaaaaaagtaaagtgtcacagcccatccctaaggcaagtcaaagtgaaagagaaacccaggaagtcagctccgtggtggtggtgatggtggcggccacagactctggagcaagtctgactttggagcaagtcagggttctagggggttctgccctgctggccccagacctgaactgaacacccagatgccagccccatgggcccatgggccacctgtggttccatgcacttggccaggtctctggccctctctagccaatttttttttttttttttgagatggagccctgctctgtcgcccgggctggagtgtggtggcatgatctccactcactgcaacttctgcctcccgggttcaagcaattctcctgcctcagcctcccgagtagctggaattacaggcaactgccacaacatcgagctaatttttgtatttttagtagagacagggtttcaccatgctggccaggctggtctcgaactcctaaccctaagtgatccacccacctcagcctcccaaagtgctgggatgacaggcgtgagctaccgtgcctggctgccaaattctttttttcttcttttgagatagggtcttgatctgtggcccagctgtagtgcagtggtgcaatcacggctcactgcaacatcaacctccccaggctcaggccatcctcctacctcagcctccccaggaactgggactacaggcatgcaccaccacgcccagctaatttttgcatttttttttttttaagagagggggttttgccatgttgcccaggctggtctcaaactcccgggttcaaatgatccgtccgccttggcctaccaaaattctgggatcacaggcgtgagccaccgcaccgggccatctcgccagcttctgaatctgagactcaagagctgaaggagggcagtgttcttggatggcctaatttcatccttccaacaaattgttacaaagagcttgcagcatgctggccctccacaatgcccacctccccacatgccaagctccagccttgtgcacctgggctcacccctctaatcccagcactttgagaggtcgaggtgggaggatcacttgaccccaggagtttgggtctacctaaacaacatagcaagaccccatctctataaaaaataaagaattaggccaggcgcggtggctcacgcctgtaatcccagtactttgggaggccaaggcaggtggatcacgaggtcaggagtttgagaccagcctgaccaaaatggtgaaaccctgtctctactgaaaatacaaaaattaaccgggtgtggtggcaggcacctgtaatcccagctactgaggaggctgaggcaggagaatcgcttgaacccaggaggtggaggttgcagtgagccgagatcgcgccactgcactccagcctgggcaacagagtgacactccatctcaaaatatatatatatatataaattaaaagttagccagtcgtggtggcacacatctgtattctcagctactcaggaggctgaggtgggagaatggcttgaacccaggaggttgaggctgcagtgaatcgtgattgtgccactgcactccagtctgggtaacagagcaagatcctgtctcttaaaaaaaaaaaaaaaaaaatttaagagatgcaacttagtctttcccccatgttccatttcttagcctctgagtattttgtttcctgcccctccctccccactgtcggcaaagcctctaaatgtcagtggagaagctctgatccaagctaccatgtggatgaaccctcaaaaacataatgctgggctgggtgcagtggttcacatctgtaattccaacactttgggaggccgaggtgggcggatcacctgaggtcaggagtttgagaccagcctggccaacaaggcgaaaccctgtctctactaaaaatacaaaaatttgccaggcctggtgacatgtgcctgtaattccagctattcgggaggctgaggcagagagaattacttgaacctgggaggtagaggttgcagtgagctgagatcgtgccactgcactccagcctgggtgacagagtgagactccatctcaaaaaaaaaaaaacacacatacacaaaaaaaaaaacccatcatgctgggtggacgaagatggacaggaaaggcacacactgtatgattccacttatataaaatatccaaaataggcaaatgtacagaggcagacagtagctgagtggttgtcaggggctggggggaggcgggagtgagaagtgactgctgatgtatgcggggtttccttttggggtgatgcaaatgttctggaaccagatagaggtggtggttgcacaacactgaatgtgctaaatgtcactgaatcgtttgctttaaaatgatgaatttccggcccgggcgcggtggctcactcctgcaatcccagcacttgggaggccgagccaggtggatcatttgaggtcaggagttcgagaccagcctggacaacacagtgaaacccagtctctactaaaaatacaaaaattagctgggcgtgatggcatgcacctgtaatcccagctactcaggaggctgaggcaggagaatcgcttgaacccgggaggcagaggttgcagtgagccgagatcacaccactgcactcccacctgggtgagagagtgagactatgtctcaaaaaaaaaaaaaaagatgaattttaggttacgtgagatgcatctacagaaaaaagaaatattcttagagtccaggggcactgaggagggagaaggagagggtctctcctggggatgagcatctgtggaaactgaggcccaagtggccagggttgtgcaatgcggttcagcttcctgggaggaggtccctccttcaagaagcctggctccgaggggcagctgagctggccagggtcaggcgcccagcaggctatgaggtcagtgagttagggacaaagactcagtgtcctgggcctggcacagtggggacgggggccctgtgaccccatacaggacagccttctctggccccggggcccaggccagggtcagctgggggatggatgtgtgaggcctgggggaggggcagagacagagaaagggacagagatagagagatacataaagatggaggaggccaggcagggtggattatgcctgtaatccagcactttgtgaggccaaggcaggaggattgctgtaggctaggagttcaagagcagcctgggcaacatggtgagactccatctctacaaaaaataatttgctgggcatggtggcaggtgcctgtagtcccagctacctgggaggctgaggcttaagccagggaggtcgagactgcagtgagctctaattgcgccactgcactccagcctgggccacagagcaagaccctgctcaaaaaataacaagaaaggtggaggaaataggtagagatcagaggaaagtcatggccccctcctgaccatcctgagaccctcccaactccaccaattcctggagagtccctcacttgccttatttcacagattgggaaactgagtccaggggcactcagaccacctgaggccccagctggagatgaagagatggattcaaaccaccccttgtggagtatagttttgccccttccagagtggagaccgtgcctcagggcttcccccacccgcaccaaggttggccctctcaggcctcatctttcccacctgcaaaatgggcttttgtgagtatgaaggagggcttggcttgcagtgagcgctgtccacccgctggccagtgtgattagtcattgttgttgttccccagtggcctctgcctggcagctgctggaaaaacatcgagggagggagatacagggctggggaggtgaaaagctggacacagacgcccctagccccttgggatcaggaacagatggaggccgggtgccctgaagtggagcagggaggactgcctggaggagggacacttgagctagaatgtatagaattacagggcatctccggcagaggccacagcagaggcaaaagtccagaggaggtgctttggggaccaccaagatggacacagtgggtctgggtttctgtggggtgatgggctggggcctcgagcgccaggctaaagggcctggctttctccgagggcggtagggagccatggcaggtgtgtgagctggaggggtaccccagacaaaggtgaagtggtatttctccccttattgaagtcacaacctgacactccctctgaagttccccacatcccaccttccccttgccacatcttggcaagcccacctccttccctccgtctctaggcctgccaagaggccctgtgggccccttatggccccacccagctgccccagaagctcgtctgagataagttcccagggctgccccactttcaggtgccccacagactcgggggcgggtgaagcaggaaggatcgagtcacgagggccccagaaaacatgacgggaggaaccacagcacttccccacctcctcagcttccgccttctcagggagagagaccttcagcccgaggaggagggccgagcttccctccatgtggcaagagaccctaacgtcgctgaggatcatctaaagagggtgttgaaggatgcataggagttagccaggagacaacccatttgttaatttaacaaactcataggcatcactcatcaacaagaacaattttcatcattcaatcaggactttctaatgcctctgagggatcatttgaggatgtttaattattatttttatttgagacagggtctcactctgttacccaggctggagtgcagtgacacaatcatagctcactgcagcctcaacctcccagtttcaagctatccttctacctcagcctctgatatagctgagacacaggccaatgccaccatgatgcctggcttttcttttttttttttttttttttacttttgagacagagtcttgctcagtcacccaggctggagtgcagtggtgcgatttcagctcactataacctccgcctcctgagtttaagcaattctcctgcctcagcctcctgagtagctgggattacagacatgcaccaccacacccagctaatttttgtatttgtagtagagatggggtttcaccatgttgtccaggctggtctcaaatgcctgaccttaagtgatctgctggcctcggcctcccaaagggctgggattaccggcgtaagccaccgcccctcgaccatccagctttttttttttttttttcagtttttggtagaaatgtggtctcatgcctgtatcccagcactttgggaaggccgaggtgggcagatcacttgaggtcaggaattcgagactagcctgaccaacatggagaaaccccgtctctactaaaaatacaaaattagccgggcatggtggctcctgtctgtaatcccagctacttgggaggctgaggcaagagaatcacttgaacctggtaagcggggtttgcggtgagccaagatcgtgccattgcactccagcctgggcaacaagagtgaaattctgtctcaaaaaaataaaataaaataaaaatacaaaattagccaggcatggtggcacgcgcctgtaatcctagctactcaggaggctgaggcaggagaatcgcttgaacctggtaggcggaggttgcagtgagctgagattgtgccactgcaccccagcctaggagacaagagcaaaactctgtctgaaaaaaaaaaaaaaaaagaaatgtggtctcactatgttgcctaggctggtctcaaactcctggtctcaagggatcctcccacctcagcctcccaaagtgctgggattacaggcatgagccaccgctcccaaacagattagaggatgttttaaggaagactcaggaggttaccaagaaaaaagttcattcaaccaccacacttcctgatgtcccttatagagacatgtgaggagagttttgatgggtacatagaagctcacaagaataaaatgtatttgttcattcaatacaaggtcctctgatacttctcaaagagaatttgaagtggattttgaagaatatatagatgttaggccgggcacagtggctcatgcctgtaatcctagcactttgggaggctgaggtgggtggatcgcctgaggtcaggagtttgagaccagcctggcaaacatggtgaaaccctgtctccactaaaaatacaaagattagccgggtgtggtggcaggtgcctgtaattccagctactcgggaggctgagcgcaggagaattgcttgaatccaggaggcggaggttgcagtgagccgagattgctccactgcacttcagcctggccaacagagctggacttttgtctcaaaaacaaaaaacaaaaaaacacaaatatatatatatatatacttgtgtgtgtgcgtgtgtgtgtgtgtgtgtgtgttaaccacagaaaaactgcattcattcattcagtcagtccagtcagtcactcaataagcactccttcttgcccactgaggggttgttcaggaggcagttcagtgtaggaattctccagatggagcagcggatttgagacctctctggtggctctctccagcatgttcccacatgcccaacccaaccctggttcagggaacctctctttccccaggattccagtcaaagccccagggagggctctgataggctgagcttgggtcacatgtacaccttgaaccaatcacagtggctgaggtggataaacgagtctgagtcacatgtccaccccaggctggactaagggagaactttgaggcagagctgcccagagtcagaacaattggccattgcaggacatgagcttctcatcacttggggtgtgcaagctacagcctgaagttcacttagtgtaggactgccagataaaacacacgacttccccacccccattgacttctgccttctcagggaccttcagcccgaagagtggggagcttccctccatgtggccaagagaccctgatgcccctgaggggtcatctaaagagggtgttgaaggatgcataggagtttgccaggagaaaatctattcattcatttaacaaactcactcgtagtcattattcattaaataacatttaaattaaattcccagttaaattggaatttcagacaaccaacatattggtttgtgttttgttttgtcttgttttgttttgtttgagatggagtctcgctctgtcacccaggctggagtgcactggcactatctcagctcactgcaacctctgcctcccaggttcaagtgattctcctgcctcagccccccgagtagcggggattacaggcgtgccccattacgcccccttaatttttgtagttttagtagagacgcggtttcaccatgttgcccaggctggtctcaaactcctgacctcagatgatccacccacctcagcctcccaaagtgctgggattacagacatgagccagcacacacggccaacacattgttgtttaatgcaactatgtcccaagtactgaagggggcatacttacactgaaaaaacattcattgtttatggaaatttaaatttaactgggtgtttgctttggaaaacagcctggttgtcttttacaaatttaaaatatagagttgctgggcgcagtggctcatgcctgtaatcccagcacgttgggaagccaaggcaggaggatcgcttgagcccaagattttgagatcagcctgggtaacatggcgaaaccttgtctctacaaaaaatacaaaaaattagctgggcatggcggcatgtgcctgtagtctcagctactccgccctccagcctgggcgaaagagcaagaccctgtcccaaaacaaaacaaaacaacccaaaacatagagttacaccatatgaccccggaagtccattcctaggtaagtacccaagagaaccaaaatatatccacaaaggcagggggcggtagctcacacctgcaatcccagcctttcgggaggccaaggtggatggatcacttaaaggtcaggagtttgagaccagcctggccaacatggtgaaacccccgtctctactaaaaatgcaaaaattagctgggagtggtggcgggtgtctgtaatcccagctactcaggaggctgaggcaggagaatcaattgaacctgggaggcagaggttgcagtgagccaagatcccgcgactgcactccagcctgggcatcagagcaacacttcatctcaaaataaataaataaagaaataaatctatgcaaaaagttgtatgccaatgtttatagcagctctattcagaatagctaccaaaatgtgaaaaaatccaagtgaccaccaacaaatgagtggatcaacaaaatgtacatgtacatatatacaatggaatattatttggtcatgaaacggaatgaagtactgatatttgccacaacatgggtgcatcttgaaagcatgatgctgaacgaagccagacacataaggccacatgttatgttttcatttttatgaaatatccagcacaggaaaattcatagaacaggaagcagattggtagttgccaggggctgagagagggggaatgaggactggctgctaataggtacagggtttcttttggggatgatacaaatgtcctggaatcagatcgtggtgatggttacacaactctgtgagtatgcttaaaacactgaatttattgcacactttaaaagcgtgaattttatggtatgtgaattatatgtcaatttttaaaattgtatgagaaaaacaagttttccctggcatcctgtatttttatttgctcaatctggccaccataacttgatgcaattctacagtacctcatggacagtcaggcccagtgacccttcctagggtcccctcgagcctgaaagcatactccagtgtccacactgtacagtggggcagccgaagacaactgcggctgcagagaaagtgcgagtcccagggaaagaaaaaatgcaggtgctaagccaggcacagtggctcatgcctgtagtcccagcgctttgggaggctgatgcaggagcatcacttgaggccaggagttcgagaccagcgcgggaaacatggcggtactccatctctacaaaaaaaacccaaaaaaattagccaggcatggtggcatgtgcctgtggtcccacctactctgggagctggggtatgggggctgaggcaggaagatcgcttgagcccgggaggtagaggctgcaatgagacaagattgcaccactgcactccagcctgggtgacagagagagaccctgtctcaaaaaaaaaatttttttttaaatgtgggtgctattttgggactttgggcttttctcagcctcagtttcccctcctgcaaaatggagtagaacaattatcttcaaatatctgtgagagatggtgtttatgagacacttagggcaaaaaggcaatcatcctcaaaaaagaaactgacaactgcagcggctacctgcttttgtaagtaaagttttattggcaccagggccaggattaaagggaggcaaacaaggctgagtggtgcaaggacaagggtctgatcatgtcttaagagttttagtgttttggccaggcaaaacaccaaaactctttggcctgcaatcccagaactttgggaggctaaggtgggtgaatcacctgaggccaggagttcgagacaagcctggccaacatggtgagacctcatctctaccaaaaatacaaaaaatcagcctggtgtggtggtgggcacctgtagtcccagctactagggaggctgaggcatgagaatagcttgaacccaggaggcaggggttgccgagatcatgccactgcattctagtctgggcaacagagagactcgtctcataaattaaaaaaaaaaaaaaaaagttttggtgttttggccatatgcggtggctgacacctgtaatcccaacactttgggaggcctaggcagaaggatcttttgaggccaggagttcaagaccagcctgggcaacatagtgagatccccgtctctaaaaataaaataaaaaataaaagttttgatgttttgttcatcataaatgttttcattaattttatgtttttaaaatattatttctcttgatggctgagttttgtggggccaccttaaattttgcacaggggtgagatcctcactcgcctcaccctagaacccgttctgctgtgtgtactgggcacattttttgttgttgttttgtttttgtttttgagacagagtctcgctctgtcgcccagtctggagtgcagcggcgctatcccggctcactgtaacctccgcctcttggattcaagcgattctcctgcctcagtcttctgagtagctgggattacaggcgcgcgtcaccacccccaagtaattttttttttgttttgttttggttttttttgtttagtagagacagggtttcaccatgttggccagggtgatctcgaactcctgacctcaagtgatctgcccacctcggcctcccaaagtgctgggatacaggcgtgagccactgcgcccggccaatgcgctgggcatattgattaacctatcttagcctcagtttcttcatctgcaaaatggggctgaacgatgctgccttacttctgagaggattcatgcaaaatatttacttctgcgctctgctggaggggcggggccagctcgcccagtgggggcggggccctgtggtcgggctccccgggaggggcggggccaggccgtgtcagctgaccggcctggccaatggcacctggcggcggggcctggcaggccggggcggggccgggggcgggcctggcggcgcggactcccgggccatggacgagtcgagcctcctgcggcgccgcgggctccaggtgaggcccctgcgcgggcgggcggaaggcagagggcgcggccaagtggacgcggcctgaaaggtgccgggaggggcggggccttcacgggctgtagggaaactgaggcagagggtggggaacgctcagatcgcttctttttgaccacccgcttctcaaagtgctttttctcatggtgggaagggggaaggtgcccccttggacatctagggaaactgaggctccaagcgatggcgtgggaggaagaggctgagggctctgcccctccccaccagctgttctaataataatgctagcaacagcagccagagagctcaccatatgttcatggttgttttagtcctattactagcgatgtattaatatgagttcatatgtattaatacctccttgggtcgtcgctgcaccactgtacaccctcagctcagccctacgacgacctggggaggttggggctgtcaggcgcccatttgtcagaataaggaaactgaggctctagtcccggaaagccactctccagaggtcgcctagctgggattcgatctgcgccctcaaccagctctcttacggcacaaggcgctgccaaccagcagtgtgacctggggggagggcacccttgcttctctgggcctcagttttccaatgagccatagggtcctccttttactgagtttatgtttaggaggctgtgtcatcaggaggtagggacacaggcgtcggggacagcagaagcctaagtttgaagccacacagggactacatgaccccgggcagccaccctttgacttctctgggcctcagtgtccccattataagaaaagaaaaacaggaattaagatttggccattttcctctgggacttagaccacacccttaagaagccaccaagttttcaggtagggaacctgggattcagcacttacccaacgaacatttatggagcgcctgctgtgtgcctggctctggagaggcagcggagtgttctgcaacctctggagctgccctcctagaaaccccaacctgttgggggaggtagacgccagagcagcggtgaccccacggagtgatcagttgtgataagggactcacagcaagtgaaggaggcgcctgacccagtcattgctgggagccctggggtagaggaggcagccaagggtggcgaggcattgcagcggggggcggtatttagggaaatgaaagaggttgacagaagctggaacctagggaggactgagcaggtggggtgggggtcggggactgaggttagctccgggcgggttgagggggtgagaggaatggggccggcgggtctccaacctggagccgcaccggtagctgcgggactgcgaactcagcaggtgatgggaagccaggtcgggagtggtcagggaaggcacgggctgagctgcagatcagagacacccggtctctggccgcgcgggggtggggcagaactggaggcgctgaggccagaggcaagagtgggggacttgggcggaaaggagggggcggggcgggattggcgagcagcgtggtgttggtgggggggcagtcccgcctccagccccagttagatgccaacccgcccgcagcctcttaaaatagagaaaccgcctccgggtaggcgaatgggggtgctgctgacgtcaagaagtggggcctgttccatggtgggggggtcaaacatttcctgatggtaagttctatgttacaaaaggggaaactgaggttcagagaagcatagccactgtccgggtttcacaaagtataggtgacagagtcagacaggatttgaacccacgcagttccggcttcctctccaaaccaacccagcacaggcgtccctccacgaaggtggagggatgagcacggattccccgactgaatgagggcattccgggcagaggccacagcacgtgcaaaggcccagaggcatgtagcctttcttacctgtttatatggggaaacaagaacttgaacctatttcttagcactagaggctgatggccaggacttaatgcttccagggccttcagtgctgattttgaagaggttagactttccccctagggtgatggggagctatggaaggtgctggagcaggagaggacatgcccatattgaggggctgggaagactcctctggagggctaggagcaggagtgggggaatcaaaaagggcaggaagccaggaaggagcatggaatgaaagtctaagtgtaccaggtgtggtggctcatgactgtagtcccagctactcaaggaggctgaggcagaaggatctctctctctctctcttttttttttttttgagaaagaatcatgctctgttacccaggctggagtccagtggcgcaatctcggctcactgcaacctccacctcccgggttcaagtaattctccctgcctcagcctcccgagtagctgggattacaggcacatgtcaccacgcccggctaatttttgtatttttagtagagacggggtttcgccatgttggccaggctggtatcaaactcctgatctcaggtgatccgcccacctcggcctcccaaagtgctagaattacaggcgtgagccaccgcgcccagccaagaaggatctcttgagcccaggagtttgaggctatagtgagccatgatcacgagaccctatctcaaaaataaaaataaaggtccaagtggaagaagattaaaataataataaaataatagtaaagtgggaataaccgttcatattaacaggctaagccctctcatgcattcaattctcccaacagcccgagtggtcagtgctattattagttccacttttcaaaggaagaaactgaggcccaaagagggaagtacccaccaggaagccagagaaattctaaccaatctggcacgtgaaggtgttgtcttcatcagccccagtttggggtctcttttgactggaaaccttgttaatggtccaggagcaccccagccaatcagggggtagatcgctgatgcgagccaatcagatttcctggaggccaaaggccaaagagtccattcacaaacgggtgctgaccggccaatccagacgcatagcccagggcgtcctctccggtggtgacaatgtgaggcgtgctgttggctgtgtgcaggaaaggtctgaaaaaggatccggcctggcccgcgggcggccagtttgcgacagccctgggtccagggaggaggtggagaccttcccaatttgggttaaactcagcctcacgcataacgtgtgcaggcaccgggtaacgtgagctgttattactactactactattatcttattacatttatcatctcctacttggacctttgctttacacatgaccgaatttcaaaacaccaggtcccacaaacagagcatcccccggcagagaagggctagagcctgtatctggacttttgtctctgccgctactggggtggctcctctaggttcagccctccaaggtgatcctgctttctcatggacagcttccacttattttcctcctcctcctcctcctcctccttctccttctcctcctcctcctcctcctcctggaagccctggggctggtgccatgtggtccatgctgacttctctcccatttaattccaggggcatcgaacttccaaccgggcttggtgcccagcaggctgagtctcacctccctttgcacgtgctgtttgctgggcatggactggtgttttccatgtgcctgcaggctttgtttgacaccccctactccaggaagccccttagctctcctctctgtgtgcctccaacccctcttctccctttgagtctctctttttttagacaggatcttgccctgtcgcccaggctggagtgcggtggcccaggctggagtgcagtggcgccatcttggctcactgcaggctccgtcacctggatacaagcgattctcacagcctcagcctcctgagtagctggattacaggcgagcgccaccacacccgactaatataatttttatattttttagtagagatggtgtttcaccatgttggccagaatggcctcaaactctttttttttttttttttttttttgagacggagtcttgctctgtcgcccaggctggagtgcagtggcgtgatctccgctcattccacctcccaggttcatgccattctcctgcctcagcctcccgagtagctgggactacaggctcctgccaccacacccggctaattttttgtatttttagcagagacgggctttcaccgtgttagccaggatggtctccatctgctgacttcgtgatcctcccacctcggcctctcaaagtgctgagattacaggtgttagccactgcgcctggccttttttttttgaaacggagtttcactctttcgctcttcttgcccaggctggagtgcaatggcacgatctcggctcaccgcaacctctgcccccgagttcaagcgattctcctgcctcagcctcccaggtagctgggattacaggcatgcgccaccacatcctgctaattttgtatttttagtagagacggggtttctccatgttggtcaggctggtctcgaactcctgacctcaggtgatctgcctgcctcagcctcccaaagtcctgggattacaggcatgagccactgcgcccggccaccttttttttttttttttttgagacggagtctcattctgtcacccaggctggagtacaatggtgtggtcttggctcactgcaacctccgcctccggggttcaagggattctcctgcctcggcctaccgagtagctgggactacaggcgcctgccaccacatccagctaatttttgtattttaagtagagacggggtttcactatgttggccaggctgatcttgaactcctgaccttgtgatccgcccaccttggcctcccagcgtgctgggattacaggcgtgagccaccgcacctggctcaaactcttgatcttaagtgatcctcccgcctcagcctcccaaagtgctgggattacaggcatgagccacagcacccagctgcttcgggtctctcttaatccctccagtatgggggtgctcctgctgtgctatgtcttctccaaaatgggatttcctcaaggtggggctaaagcttgttggggaggcagcatcccccagcctgggcaagcgcagacgggtataccataaatattacctttaaagggcagtttcagggggtcggggcctccccaacctccactcctctgggtgggaaccactcccaggggaacagcaggcacagagggagctgtgggtggaaagcagatggtgcggggaccgaagggtccgggagtggtgccaggagagttctgtgtggtccagcttccccgggagcctttgcagggagctgccgattttgcctcacctctctctgccactttaaaaaaacatcttcaggccaggcacagtggctcatgcctgtaatccagcgttttgggaggccgagatgggaggactgcttgaggtcaggaggtcaagaccagccagaccaacatggtgaaatcctatctctactaaaaatacaaaatcagccaagcgtggtggtgggcgcctgtaatcccagcttacttgggaggctgaggcagaagaatcgcttgaacccaggaggtggaggttgcagtgagacaagatcgcaccattgccctccagcctgggcgacagagcaagtctccatctgaaaacaaacaaacaaacaaaatattcacatctttttgtcttttggaagcaactttcaactggtggttattattcacgtcttgatcattgtcttgactcccatccatccaagtctcccccagcaccaggctctgagcttgctactcattgattcctccagggaccctatgtcactgggccattttccaaatgagaaaactgaggcacagaggggttaagtcacttgtcgggtcacacagtgcaggagtgggggagccagactgggaacctaggactgtcagagttttggaaggaaatgcctggatggggtgcaagtgggaccccccaccagggttcaaatccctccctgtttcacgtggggtagtggaggaagtggtataagatcccacaactggctgggtgcagtggctcatgcctgtaatcccagcactttgggaggccaaggcaggtggatcacttgagaccaggagttcaagaccagcctgggcaacatggtgaaacctcatctctataaaaaatacaaaaattagccgggtgtggtggcacatgcccacaatcccagctactctggaggcggaggttgcagtgagccaagattgcaccactgcattccagtctgggcgacatagccagacgctgtctcaaaaaaaaaaaaaaaaaaaaaaaaaaaaaaaaaaaaaaaattcccacaactattggaaggggaagaaggagaccctaatggccacggtgatggtggtgatggttccatcaccatgactgcttgaactaaacgccgtgagttgtctgtcctcagacatattcaagcagtcagagagaccttcgaggggtagattattctcctcccatcgtgacagcttggttttctgagcgcagagcagctgaagtcaggcctggggtaacgccacacccccgcgacccttccccgcctctcccgggagaccttgccctcccagctgggtcatccggcagcccagcagcttccggccccctccaattggctgtaggggccgatggcgtcactggttgctatggcgaacacccagatcacgacgtgggcagcctggagcccaccaaagtaaaaatagtcgtgtgtccccaacgtggccgccctgatgtgtgtggagggagggtgtcctgagacccagtttcctgcctctcactccactaagagacgtgggcagccggctttcctctgcacctaagtttccctgccagtaaaacagcccctgcccgcggttcgtaggaggtggctcagtaaatgcaaggacatttaccaggtattatgacagcttccatggtcccttgctgagctcaacaatagtacaacagcacacaacagcagcaatagtaatggctgatcatgattaacccagaaccctcctcacgtcatctccagttacagatggggaaactgaggcacggggcatacaaataatttgcatggccaggaagaaacagagaattgaactggacccaggtctgggtgtccccagattctaaacttgtgccacatggcattttgagaatttaataaaccctcgtgattgaccgggtgcgatggcttacactgtaatcccagccctttgggaggctaaggtggatggatcacttgaggtcaggagttcgagaccagcctgggcaacatagtgaaacctcgtctctgctaaatatacaaaaattagccaggcatgctggcacacacctgtaaccccagttacttgggaggctgagtcaggagaatcgcttgaacccgagaggcagaggtttcagtgagccaagactgcaccactgcactccagcctggcgatacagtgagactccatctaaacaaacaaacaaacaaacaaaaaactggttttttggccaggcatggtggcttatgcctgtaatcccagcattttgtaatcccggcattttgggaggccaaagtgggtggatcatctgaggtcaggagttcaagactagcctgggtaacatggcaaaaccctgtctcttctaaaaaaaaaaaaaaaagtcccagctactctggaggttgaggcaggagaatcgcttgaacctgggagacagaggttgcagcgagccgagattgtgtcattgcactccagcctgggcaacaagagcaaaagtctgtctcaaaaaaacaaaaacaacaacaaaaaaaaaccctcttgggcagcccatgtctgaggatggactgtgaggtcacagtggaacacaagctcacggctttctatccttcatgcggtgagggcacccagagttggtgcaggtcagtttgctgagctctaaaagggtcttcaaaagggagtcacccgtcagccgtcctccccacgcccccactggtacccagggcccaaacctgcataggctttgcagcgagtgaggagagaatggcgttcagacctagacccaggaggagagggacatctgagatgggacagggagaggacaactcaggaatctctgttttctcaacagattattagtttttagccactactgacatacttcttcataaatacaactaattggtaattttaaataaaattattattaattttttttagacttagagtcttgctctgtcacccagactagagtgcaatggtattatcatagttcactgcaacctccaactcctggggtcaagcaatcctcccacctcagtctcctgagtagctgggattgcaggcgtgcaacaccacacctggctaatttttttttcttttttgagacggaatctctcattgttgccaggctagagtgcaatggcaccatctcagctcactgcaagctctgcctcccaggttcaagcgatcctcccgagtagctggggctacaggtgtgcaataccacgcccagctaatttttgtatttttagtagagacagggtttcaccatgttggccaggatggtcttgatctcttgaccttgtgatctgcccgccttggcctcccaaagtactgggattacaggcatgagccaccgcacttggcccttcttatttatttatttatttatttatttatttatttatttatttatttttgagatggagtttcgctcttgtttcccaggctggagtgcaatggtgtgacctcggctcactgcaacctccgcctcccgggttcaagcgattctcctgccttagtctcccaagtagctggaattacaggcacccaccaccatgcctggctaattttgtatttttagtagagatggggtttcaccatgttggccaggctggtcttgaactcccgacctcaggtgatctgcccacctcagcctcccaaagctctgggattacaggtatgagccactgcgcctgaccggcccggcctttttttggagacagggctcaagcaatcctcccacctcagccccccaagtagctaggagtacaggcttgagccaccatgcccagcaattttttttttttttttttttttttttttttgtagagacggggtttcactctgttgcccaggctagtttcaaactcctgaactcaagtgatccatccgccttggcctcccaaagtgccagaattacaggtgtgagccaccgcacccggcctactctggctaatttttttaaaaagttttgtagagatgtagtcttgctatgttgcccaatctggcttaaacttctgggctcaaacaaccctcctgctttggtctcccaaagtactgagatcacaggtgtgagccaccgtgcccagcctaaaatattttttaatgcaggtatggtaggagccgggtggggaattagactgtgaatctggagggcctccaggaagaaaggatgttgagttcagatctggagtatgagctgcagttaattagggccagaagggagggaaggctgttctgagagagcgcacagatagcgcaaaggccttgaggcagggctgagccagtgtgtagagtgagcgggaaagatgcattggttggggcatgggattggggattgtgggggtgcatcaacggccaggggttctgagggctagtctctctgagaatgatccccatttctgtctcattgcagaaggagctgagcctgccacgccgaggacgtgggtgagttcacctgggactggcgggctgggtgggccccagtggtcttggaagtggatatttcagcaacagccactgaattgtgaatgtatttaataattacagcaacacatctcatgttcattcttgccctcgtgtttgcaaagtgcttcacaagcacctggcctctcaccacaaacatgggaggccatgccagtttgcaaatgaggaagctgaggtgcaaaggggtttcatcaccagctaaggacactcagctgggaaggagagaaacttgtctggaatccagagtccagatgttgaatttcagctgaagtgtattagaactggcttgaatgcctctcatgacggggagctcacttccttttggggaacaccagcagaaaatcatctctcagctaggcacggtggctcccgcctgtaatcccagcactttggaaggctgaggcaggcagatcacttgaggccagaagttcaagatcagcctggccaacatggtgaaaccccgtctctactaaaaatacaaaaaaattaaccaggcgtggtggtgctcgcttgtaatcccaggtactcaggaggctgaggcaggagattcgcttgaagtgaggtgaagattgcagtgaaccaggctcccaccaccagacttcagtctgggcaacagagtgagactctgtctaaaaaaaaagaaaagaaaaaaatcatctctctcgggatcacatcagtgttcctgtaggttgggtttttttttttttgttttgctttgttttctttttgagacggggtccctctctctctgtcacccacatagtacagtgcagtagtgtcatcttggctcactgcaaccactgcctcccaggttcaagagagtctcccgcctcagcctccagagtagctgagactacacatgcgagcctccacacctgacttgtatgtttagtagagacagggtctcactatgttgcccaggctggtctcaaactcctggactcaagcgatctgcctgcctcaacctcccaaagtgctgggattacaggcatgagccaccatgcccagtctaggttaccattttttatccccaaatcttagagaacattattgttcaatgctttcattcatttacagatgaaagaaaccaaaggccggggtggggaggggttttccttgagctagtggtctggaagtgtgtgactgtggacaccccatctttgggagctgcttttgcctgagttgggggtgggaatcactcaatgaacatttttttgagcacctgctgtacactgggccctgctgaagccagaggggatacagacaattcaatctcagagcaatggttgaagttttgtactcaggagagagctcaaccagagaaagagacagaggtgctgggggtggctttatcctgaagatctggggcctcttggaggaagtgacctttgagcttagatctggaagaagaggaggagctggcagcggggaagtctggggagaatggcattccaagcagcaggaacagcttgggcaaagtttctggggtgccagtatgcttggcgttagaagaacagcatgaagacaagggtagctgagtggagtgagtggagatgaggtggcaggacagaaggaggaggtcctgggaatggggtcagagtggcccccaatcccaggccatctgcttctgttccagtggggatgatacagttggtggggaggtgcttgaaggccccagtggttgggggttgctgggggactgggacattgccccgagagccggcactgtttccagccttggcccaagctgtgggcagagtgttggaccgtgaatcaatgaggactgccgagggcaaagtcctggaccttggggcaggacagagccaaagactccacaagggatgtccactccctgccaccttccctgtgccccactgggtccaccggggcctcaagagggccagagtgagacacagacacccccagaccgtggggtttgcgctgagagggaggaaggacagagctggcggcgcctggtgctggtgggggtgcaggtacagcttggcggaggaggggctggtggggttgggatcgtatatgggtgagggggcgaccttcctggcagaggaaacagctggaagccagggactggaggtgtggtcagagcctctagtgtgcgcggggatgcggagacccgagcgggttaggacctcagtgctgagcagctggccgggatgcggggttggggagttggggcggactgcgctcagatcccggctcccagagagccccagggccggggcgagggcagaggccgggccggggcggggagaggcggggtcaggccatggagcaatcgcgcggaccgcggagccagtgaccgcccttcccttccggggcgcagctcgggggctcccaagccggcggcctcggcgtccctgcggcagacagggcggcacccgcggctcccctttcccgctgcgcgaccctcgctgccgggccgggcctgcgcgcaggtgcggagctgcgatccccgccccgaggcggagccagcccggcccccagcggcccagcccccgcgtctagtctgccgcaccagccaggcgtctgtccctgcgtccgtgtgtccgtccgtcggtccgctcgcgccacgatcagggcttccgggggccaacaagggggcgtcggtaccccgccgcacagaggcggcctctgcctcggcatgaagtcccgcagggacaagctgcacatcccggcgctgaccctcgagtgagtgttgggcagggcgggggtatgcggggtgcagggaggacaggatgacaactaccctccccccacgtctctgttcgtgtcgcccagaaacgcaccgccgcctccggggagccctcccgggccatcggtctggccccgccctcacgtcctgagctgaacccagaatccccggtcttgggcccctactccctgagggaaccgcagccgccatccggagatccggattcggccacacgaaggggcggccgccaggttcaccgtccccggcctctttctttgcagtctgtctccgagcagccagagcccgtccctgctgggtcccagcagcccctgcagcccctgtagcccctccttgggcctgcacccctggaggtaagtgacagcgcgtgtgggcggggcgcagacatcgccctggcaccccagagccttggaaaccctccagactcatcggtctcctcaagatactgcaggttggtgacatcacctctctgggcctcagtttacccctccacataatggcactgcgatacgttctaggggcttaatgggaaaattccatttttagccaggccagcatctgacaggtggccaaggaaagggaagaacttaagctgttgcccaaggacttcgccaagacaggtgccggattcccaagcggctcagggcactccctgctgaattggcctggactcctgggtggtgacctcagggagaaagctcctccctctaaaacacacgcacacccaaggctgagaggccaccaacgagagccctgtgaattgagattaaccaaagtggcgccgggagaaaagaaccagggtgactgagcgctccctaaccctttcctgatccctacttcccagttaagaaaactgaggctcagagaggagatgccagttttcctgattcagtccatcccccgggggccaagcatcagggacagctttgctaccaggtctgttgagggttctactggccagttggttgactctgtgactggccaggtttcaggacaggaaggagttttgtgagctcctctcatggtttgggcaaaagtttagggagggacagatgtgaggtcaatggtgtctgttagagttatgtggcccatcaaccatttacactttagtatgaatgagctgcttaactctttccacagacttttttttttttttttttttttgaggcagagtcttgttctgtcccctaggctggagtgcagtggtgcaatctcagcttactgcaacctccacctcctgggttcaagcaattctcctgttgtagcctcccaagtagcagggactataggcacctaccaccacatccagctaatttttgtattttagtagagatggggtttcaccatgttggccaggctggtcgcaaacccctctgcctcagcctccccaagtgctgggattacaggcataagccacacgctgggccatccacagacctttaacggggagaagagagaacaatatagagcccacatttgggtgctgggcaacagggaggtaccttccttcagacgccaagcacttatgaggcacctactgagatccaggtgctaaaggcattgctataaagaaaacatagtccctccatcaatgacttctcagtcagcttagggaattcagtgataaaactaatggataaacaagatgtattcagacagggacctcttggggaggtgatgtttgagccaaggcctgggcacagctaaagaaagattggcaccaggcagtgggtactgcatgtgcaaaggtcctgtggcaggactgaggtggtgggttttttgtttttgttttttgagacagtctcactttgtcgcccaggttggactgcagtggcatgatctcggctcactgcaacctctgcctcccaggttcaagtgattctcctgtttcaggctccgagtagcggagactacaggcgtgccaccacgcccggctaattttttgtttgtttgtttgtttgtttgagaagggatcttgctctgttgcccaggctggagtccagtggtaccatcttggctcactgcaacctccgcctcctaggttcaggtgattctcctgcctcagcctcccaagtagctgggattacaggcacacaccaacactcccggctaatttttgtattttcagtaaagatggggtttcaccatgttagctaggctggtctcgagctcccgacctcaagtgattctcccgccttggcctctcaaagtgctgggattacaggcatgaaccaccaagcctggcctaatgtttgtatttttagtagaggtggggtttcattatgttggccaggctggtcttgaactcctgacctcaggtgatccacccgccttggcttcccaaagtgctaggattataggcgtgagccactgcaccccgcctgagattttttttaagcctctgtgtctgccttggggggagaaagttctgctggggccaggaatggaggtggccagagagaaggaggtggctaggacaacatccaggaacaagtcgaggcatccactgagaatcagagactgccatcacccccatttagtgaagaaaacaggggcataggacctcagaatgtgttatcaggagcatcctaggaaggtttcgggccagatctgactctgtctaaatccttggcttccaccccaggtgaggacatgatgaagggagggacccgtgtgttggaggccgctgagcagatttgaccagttttaactgggaggggagggaggaagtatctgggactgagaaaggccataaggctgcctcactcaccaccggggggcagcagagccacattgccttgggcctggcgggggaatgggtccctgcctgccatgttccaagcatcctaggaataagctcataaacgtcccaacagagtccagcctctgcaactcccctgcctcctttttttttttgagacagtctcgctttgttgcccaggctggggtgcagtggtgtgatctctgcttactgccacctccgcctcctgggtcaagcgagtctcctgcctcagcctcctgagtagctgggattacaggcatgcaccactacactcagctaacatttgggtggttttttttgtttgtttgagacggagttttcctcttgttgcacaggctgcagtgaagtggcacgatcttggctcactgcaacctccgcctcctggattcaaatgattttcctgcctcagcctcgtgagtagctgggattacaggcatctgccaccactcctggctaattttttgtatttttagtagagatggggtttcaccatgttggccaggctggtctcaaactcctgacttcaggtgatccacccgccatggcctcccacaatgctggaattacaagcgtgagccactgcgcctggcctgatctttatatttttagtagagacagggtttcaccatgttgaccaggctggtcttgaactcctgacctcaggtgatccacccgccttggcctcccacggtactggaattactggcatgagccattgtgcctggccttgcaacttccctgcttccatcctatccatctccccgtcgctcacttggctccagccacatggctgatcctccagaatgcaggctggtccagcctcagggcctttgcacttgctgtccccactgcccagagctctgttccctcctttcttcttccgtcacatcctcatcaaggcctcagcctcagataggaagccttccccaaccaccccctccttccaggccccacaaacatggggtataatatgcattatacctgtccatttccacatccagaccccagggattttctttttctttttttttttttttaagacagtcttgctctgttacccaggctggagtacagtggtgcgatatctcggctcactgcaacctttgcctcctgggttcaagtgattctcctgcctcagcctcgagagtagctgggattacagacatgcgccaccacgccctgctagttttgtatttttagtagagacagggtttcaccatgttggccaggctggtctcgaactcctgagttcaagcgatctgcccatctcagcctcccaaaatgttgggattacaggcataagccacggcacccagccaaccccagagatttaatttccacattgtcttgtgtgattatccagttatttttctcacccagaggtttgacagcctctccgagaccagaccttgtctgtcctggtcatatcgtagactcagggcaggcccagggtgtatacagcaggtgctcagttaatgcatgtggcttagatgaatgggcagtatctgggagggctgtccttgtggtagtgatagcattgggggttgggggtgttgttgaagaaggccatgagttgggcgctcataggcaaagtggctgttccaggcagcaacagcatcgtcagagacactttccttctggagcctcaaatcccaagggcaggaagaatgtggattttctacctagggcactaggagccatagagtgtggtgctgggagcggcacagatatatgggcaggtgggaagcgctggggtagtcccactaaaaagggaccgttgaacgggggtgtctgtatatctacctgagactttggcatttacagtcacagcacatgcagggagagtcaaatgccaatgtcacagagtttgtcagggacagggctaggatatgacccctgggagagggattcacccaggaatgcagttttgttttgctgtgagagcaatagggagccatggagggtttgtgagcagggggaagggcatgatctggggagcagtgggccgacaccagagatcagtggctcagccagcctttcatggaaggccttcaccgtggcagcaggccctctggattgtcagctgcagccctgttttgcagagggggaaactgaggacaaatgagcatgggagaaggttctctccctgctacagatgtcagggcagtgggtgtatgtaatagggggtgtgtaggtgttactgggtgtagctgtggctggggacgagggggcagcgcctttaccgagtgtgtgcaaaggtgtgtccccgtgcatatggggtggctcagcacgtagtgacagcaagtggagactgtggccccatccccacttgggtccccagactcaagagaatctgcaccccgcatgaggcttgggctgcatacctgggggtcataggtgaccactcccatactcatcaccatctctggtggtctcaaaaccaccatctcccctggtctcaaaacaagtcccaaatccacccacttttctccacagcttcaatattcccctcccagacaccgtcccagacccttactggcctcctgctaccttcattcctgtcccccagcagtctgctccccatagcagacacaagggggtttacaaacgtagtccacatcataccctttctctgctcaagcaccctccatggctccccattgctcctacaatacaattgcactcctccctgcagcccacaaggcttatgtggtcagccccgctggcattttgccctcagtgctgcctcagagagttgtgccctttgcctgggacacgctttctgcatagccagctccttcctcctccatttctggctggctgcagcattacctcctctgagaggcctcctggctaaagtcgccccttgcagtgttctctcctttctcttcccttctcagccttggtatttgaaattatctttttttttttttttttttttgagacggagtctcgctctatcacccaggctggagtgcattggtgtgatctcggcccactgcaacctccacctcccgggtacaagtgattctaccacctcagcctccagagcagctgggaatacaggcatgcaccaccatgcccagctatttcttttgtacttttatttcttttattttttatttttttttatttttttgagacagagtttcgctcttgttgcccaggatggagtgcaatggtgctatctcagctcactgcaacctccgcctcctgggttcaagcgattctcctgcctcagcctcccaagtagttgggattatagggacgtgccaccacgcccagctaattttgtattttttttagtagagactgggtttcaccttgttggccaggctggtctcaaactcctgacctcaggtgatccgcccgcttcggcctcccaaagtgctgggattacaggcgtgagccaccacgcccagccgaaattatcttgctcattgaattgtttcctgttggctgggcaaggtggctcacgcctgtaatcccggcactttgggaggccaaggcgggaggatcacctgaggtcaggagtttgagacgagcctggccaacatggtgaaactccgtctctactaaaaatacaaaaaaattagctgggcgtggtggtgcaacacctgtaatcccagcttctcgggaggctgagacaggagaatcgtttgaacccaggaggcggaggctgcagtaagctgagactgcgccattgcattccagcctgggcaacgagagcgaaactctgtctcaaaaaaaaaaaatttgtctctttagctatgaagcctgggccccagcattgggcctggactgggtcccaaagtgtcctgtggcccaggaaggggcatccctcatgatgacactgcccctgacttgcctgggctgtcatgacaggaggaagcattaattcagtccttacggtgggagacacttctgcttccatagtgaacacatattgtaccctcagccctgttccaggctctgtgtctcagattttattctgttttcagtatgggggatgttacgcatggggaaacagaggcctggaagttagcctgatgctatcgtttatagagataaattatatatagatatggaacatataccaggtgcccttggaagcgcccccttacatctgatttgtgtaattctcatgtcagttcagttttcctccaatttcacagttgaggagactgaggctggagttcaatcaggtggctgcttcctaactgaggcagggctgatggcctttcccgccacacacagacagagcatgtcagacgccccgactcaatttgccaaacacaccctctatgccagtccggtgctgggagctgctgggaccctaaggagcccccagcctggggaagacatagccggacagacaggaaagcgggtttttcagaggagaggacgcagttttgccaggctagattccaagcagtggggccagggtgggcgtggtagcatgagccggccaggacgctggggtgggtcttgggtgccgcactgagaaggggtcagtgctctgggagagaggaaaaagatggagggagcgattagatttacattttagcagaaaggagccaaaatgcctgcccctagctcgaggttaaggtgctgccaacgccccgcccccgccgcccgcggtcgtagcaacgcccggcctcagccgcccgcggccctagcaacgctccgcctctccgcccgcggccatggcagcgccccgcccactcgccggcacgcgggtccgccggcctcgcttccgcgtcgctcgctccgcctcccgacaggccccgcccccaacggccccgcccccgcactcgcctgggcggagttccagtcgcgctcgggggcgcgcgcttccttctcgccgcccccccatccccgcagccccgtgcgcccccctccctgtccggctccgcggggctcctggggccgatcccaccgccgaggcctcccttcccggcctcgggcggctgcggcggcacaaagggaagcagcatgtccgaccccagctactggacggcggtggcggctcccggccatcggagccgcctggcaaaaggcgcgctgctgcagcgctccaagaggtagggggcacggcgccggcgaaggctcggcggccagccgagcaaacaggagttgccagaagtgtgtcctggccgcgtggcgcggaccacggcgagcgtctgtctgtggcagcagtgggaaggggggaggacgcctgtggatcgaggtgtcccctggggtccctggcaccctcctttcgcccctcgttccctggactggggtgtctgtccgccagcgtcgcagctggggtggtgacagacaggagtgagttgagattgagctaggatttgaacccgggtgtccagggctgggcagaaccagggaggaacttcttggaaaaactgaggctgatctgccgctgggggtccattcagcagaaatgttggctcagaagcaaatatttactgcacgaggctggcatttgggtggggtgtcaggagtccagatagttggggttaacccccgccaaagcctcaccgctcttggagtctcagtttccccttttgaaaagcagagaggataagtgagggctgtggattctaccagacctgggttcaaatttcgactcagccactaccaggctgtgtgacctcaagtagctccttaacctctctgtgcttgggtttctcattggtgctggactggggcaaagtctgggcggtgggaccagctaccgaaagaccttgaatgctgagtccagggcttaaacttacctccaagatcgtggggagcattggagggggaatatgggtgccagagggatgaggtgcaggaggctggcttcaggcccctgctttctgccacattctctctgttgtgtcctgggtaccaagagaggatcgttctcaaatggcaacttctcgaggtcctggatctcctccaggaagagttgaacaaacagtcggccctgcatagatgcttgggaagtgaacagatgatgcttagttctcctttgaggcctcacatttggccgtgttttcaagaagacctcgcccaagaacaggagggagggcaacgaagtgtttttcccaaatgcttttggaagcagcaagtgatacagcaggatcggggagggagggtgctggtggtgcagtgtgggggcgaggaaccaggtgaggggctgggagaggatgtggagacagccaggtgagcgtgcattgaggggttggcaggaagttttgcagaaacctgtgggtttcacttttgcttctgcagctcaggctgggagacaatcactgtgactgttgacatctgtggcttcagtttcccagtctggaaaatgggctcagctggtcattcccaactctggggcttgttggaattggcagatgttggggatgtaattcactcaggaggcactggctgccctcccggcgtgagccaggccctgtgagcattgtctaggcaaagacaacagtgtatgtacccgagtccgacccaaagctgagcactggatgtggtaggtttcatccttcaaggtagagatgaggaaacaggctcaaggggcagccacatgtggagacgtagacaggctgggcctcttctccctgcccaccttgtcacctgtgtcctttgatgatcatacgcttgttctcccatggattgacctgctccgagcattctgcctgggaccccatttctgcacctcggaggccccgagacttcatctctccctccccgcgagattctcccgccgctgagctgcgttggcggcttggggtgtgtgggctgatgctcttgtggagcagagctgttgctgggcaactgctctggtggggcgggggacggtgtcgctcccaacttccttctgtcaaggtgtgggctgaggccagggcccaggtgggagaagaagccaggcagggtgtgagagacctgggccagggatctggtggccagaagggaactgggatggaaagaggaaaacgtgggcaaaagttcagcagaagaggcaggactgtgaaagaggttgcatttagggtttctagttgggtcacattggcattttaggggcatcttgagaagaaggagggttgtcaagagatgggagcaggggcttcaagaggggtatatagaatggggtgtctcagcccatatctgggctccagggtgtgtttggttcacctgatttgctggtgctgctggcagtagccatggtacagggaaaagtgtgggggtgggactgtgacacagaaccctgaaaagctggtccaggggctcctggccatatgtagtgtcctccatcaggctagaagcacttcatgccattgctgttaataacaacactgccaatagtttgtgttggtttttgttattgtttttcagatgaagtttcactcgtgtcgcccaggctggaatgcaatggcactatctcagcccactgcaacctccgcctcctgggttcaagtgattctctgccccagcctcctgagtagctgggattataagcatgcactaccacacctggctaatttttggtttttttgttttgttttgttttgttttgttttttgagacggagtttcactcttgttgcccaggctggagtgtaacggcacgatctcaccacaacctccacctcctgggttcaagcgattctcctgcctcagcctaccaagtagctgggattacaggcatgcatcaccacgcccagctaattttgtatttttagtacagaaagggttcctccctgttggtcaggctggtctcaaactcctgatctcaggtgatctacccacctcggcctcccaaagtactgggattacaggtgtgagtcaccatgcccgacctaatttttgtgtttttagtagagacgggtttcaccatgtttaccaggatggtctcaaactcctgacctcaggtgatccgcatgcctcggcctcccaaagtgctgggattacagggatgagccactgtgcccagccttgtttttgtttttttaagagagagggccttgtgctgtcacctaggctggagtgctgtggcaccatcatggctcacggcagccttgacctcctgaggctcaagcgatcctcttgcctcagccttctgagtagctgggactacaggcgtgcaccaccacacccagctaatttttaaattttgtatagagacggggtcttgctatgttgcccaggctggtcttgaactcctggcttcagaggatcctcccaccttggccttccaaagcactggggttactggcgtgagccaccatgcctggccagcagtagtgtcaataataaggaatgttagttgaggggtgattccctcctgggccttgaagacctggctaagggccatgggggaacccagctgggggcagagtgggagtggccatgtccaacatcccatccttctccagaacgggctgcgagtgtgatttaggctgggcaggtggcttagcgcggggccctgggcagccacctaccctgtccccttttccccccacagctgccgcagcgggaaccgcaagagcttggtggtaggaacgccctccccgaccctctcccggcccctgtcgccattgtcggtcccaacgggtgagtgtgggagcagccagcgggtgctgtgtcctgcctctgccccgctgactcagtttccccgcctcctcctcagcaggcagcagccccttggatagtcctcggaatttctcggctgcctctgccctaaatttcccctttgcccggaggtgagtgattgccggctttgggagacagtgcgggcaccacgggcaagggttgggcaggggcacgtgctcggtggctagacctggctcctcattcatttcattcaccttttcccctcccctggcccgtctggtggtggtctccccctctggctcccattcccggcaaatgcatgccatcttgcagccacatcccacgcatggacaggtaatttcaaccagcccagggggtggggggtcatggggggatatagccctaagaatcattaactcactaaagaaatcattcattcattcacttaacaagagctgattgagcacctgtcatgtgccagacgcttgcatttcatttatttattcatacaacaacattcattaagcacccactgtgtgtatgctctgtgctgcgggctgagggcatggtcgcaaatgggcagctggccctgagcccctggggagtcctccgtttggtggggggtggtcaatgtgtgccccagaagctacagctcagaggttgaagctttgacaggggacacagtggcagctggactcacgggggggcttcctggaagaggtacctaaagagagagagcatgcagtggacttggtcagcctgtgtctctgttcttggttattttcaggagatccttcctacaacagggccagaatatgctggccacagtgtctgttcttagtccccacaaaccacaggggccaggccttccttccatctgttcttgttcccctctccagggcagacggcagaagatggtccctcgcgtctctcccatcttccggctatggaaccaacacacccagctccaccctctcggtacccatagccccaccttggcaggtggacaggcagatgccgggttgtggggggacacatctttgtgtgtttttttcaaggtgttggatagttgtgcagtcagcaaacatactagttacttcctccatgcacgccccattctgggaaatgcagggtcccctgagaagacccagccttggccccaaaatagtccctggttggggagatacagatatcctcagcctatggggtcagggcctgaccagagggggacttggggctgcccaggggtacaggcagagaggacttcctggaggagagggcatcagagctagggttttgagggatgcataggagctaggcaggagaaaggatgttaccttctgatggccagcaggcagcctgggccttgaggggtggtgctgggttcctggccacagcactgacggtgaactcatggctctgatccccaccactctctaccagtcaagctcatcctcccgggaacgtctccaccagcttcccttccagccgacgccggacgagctgcacttcctgtccaagcacttccgcagctcagagaatgtgcttgatgaggaaggcggccggtcaccccgcctccgaccccgctctcgcagtctcaggtgggccgcgacctctggccccagccccggcccctccctgggctggtgtggaggcccaagttgtggctcctccttcaccccagccctgaccctgcctgagcctagcctctgattcttgtccctcaaccctggctcagatcccccaacatcctcccctggggttggtctcaggtcccatatcacaagccagctgtcttcctttcagcccgggccgtgcaacggggaccttcgacaatgagattgtcatgatgaatcacgtgtaccgggagaggttccccaaggtgggcagcgcctggcggctggaccagcccctgcacttctttccacattgctgtccctccatggaactctgtcttcctggctatgtcccctttgccagtctgttcatttctgtctttccttccccttccgttgaaagatgtcgttcctcctgcaccagccctcccacccgatcgccccattgccccatctcctctctccccaaccatgcctctcctgccccattctgcgtgtgtcactccagccccgccctctgaccaggtcgccccgtctcgccccacccaggccacagcacagatggagggccgtctgcaggagttcctgacggcctacgcgcccggcgcccggctggcgctggctgatggcgtcttgggcttcatccaccaccagatcgtcgagctggcccgagactgcttggccaagtctggcgagaacctcgtcacctcccgctacttcctagagatgcaggagaagctggagcggcttctgcaggatgtgcgtggtttttcgcatgttgaggttttgcatgcagtgggacgtggagtgaggggggtccccaggccagacggtgctgaggacctgtgggtgatgccacgacccacctcccccaggcccatgagcgttcggacagtgaggaggtcagcttcatcgtccagcttgtccggaaactgctgatcatcatctcacggccagctcggctgctggagtgtctggtaagtttctctttctacggccagcttggggtccaggcagaactgagattgggaccacaacagtcctgccaagatacaggtgacagttcccatcgtgtagggctttgagaggaacacagggtgctattgggctagcgtgggcttccctaaggaggcagcgggagtggagacccagtgggtgagctgggaagggtgctccaggcagagggaacagcatgtgcagaggcctgcaggtggaaccaagccctgggtgaccagccctcctgtgcccctaggagtttgaccctgaggaattttaccacctgctggaggcggctgagggccatgcgcgggagggccaaggcattaagactgaccttccacagtacatcattgggcagctgggcctggccaaggaccccctggagggtaagccgggatgggaagaggaaaccaaggctgggaaaggccggatggaggccaggcacggtggctcacacctttaataccagcactttgggaagctaaggcgggcagatcacttgaggccaggagttcgagaccagcctggccaacatggtggaaaccccccccctactaaaaatacaaaaattagctaagtgtggtggcgcatgcctgtaatcccagctactcaggaggctgaggcacaagaattgcttgaactcaggagatggaggttgcagtgagctgagatcgcgccactgcactccaacctgggcgacagagcgagaccctgtctcaaaaaaacaaaaaaagaaagggcagatgaagccaggattcaaacccaggcccatccgattccagaaccaccgcactgttctttgtctctctgtggccttgctcttaggtcacctgtgggaattatgctgagaccctctgatcttttggggcccaggggcctcagtgtcctcaaatgccacgttaagatggtcaggaagcctggggaccagtgttagcagtggccttccctttgtcctgcaaattcacaaatgactttaccaatttctgtggcctttactgtggcccagaaagtgaacttggagtcaaacaggacaacccgtaggtaagaagacggtcaaaaactcccacagccggccgggtgcggtggctcacgcctgtaatcccagcacttttgggaggccgaggtgggtggatcacaaggtcaggagttcaagaccagccaggacaacatggtgaaaccccatctctactaaagatacaaaaattagccgggtgtggtggcgtgtgcctgtaatcccagctactcgggaggctgaggcaggagaatcatttgaaccctggaggcggaggttgcagtgagccgagatcacaccacttcattccagcctgggcaacagggcaagactctgtctcaaaaaaaaaaacaaacaactcccacagccagccaggtgcagtggctcacgcctgtaatcccataatcccagcactttgtgagactgaggcgggtggatcacttgaggtcaggaattcaagactagcctggccaatatgcagaaactccatctctactaaaaacaaatattagccgggtgtggtggcatgtgcctgtagatcccagctacttgggaggctgaggcaggagaatcgcttgaactcaggaggcagaggttgcagtgagccgagatcacgccactgtgctctagcctgggtgaaagagtgagcctacatttcaaaaaaaaaaagatgtagctgggtgtagtagtgcgcgcctgtagtcccagctactcaggaggctaaggtgggaagatcgcttgagcttggcaggttgagactgcagtgagctatgatcacaccactgtcctccagcctgggtgacaaagccagaccctgtctcaaaaagagaaaaaaaaaaatttccacaaatagccaggataagaggaactgaaagctggagcattgaacttggacctagcctggtccagcagtagccagggggaggctctgggaggaggcagtgttcaaactgaggcctggagggcaggaggtgaccaggttgcagatccaaaggaaagagtgaaacaggcagcataggcatagaccctaaggttggaccatacctggagtgggactgacctgccactgtccccattgaaagctggggaggcccggcatggtagctcacacttgtaatcccagcactgtgggaggccaaggcaggaggatcacttgaagccaggagtttgagaccagcttgggcaacatactgagatctcgtctctattaaaaaaacaattagccaggcatgatcgcacatgcctatagtcctagctacttgcggggctgaagtgggaagactgcttgagcccaggggtttgaggctgcagtgagctatggtcgcacaactgcactccagcctgggtgacatagcaagaccccatctctacaaaaagtaatttttttttttcttttttgagacagagtctcgctctctcgcccaggctggagtgcagtggcacgatcttggctcactgcaagctccgcctcctgggttcacgccattctcctgcctcagcctcccgagtagctgggactacaggcgcccgccaccacgcccggctaattttttgtatttttagtagaggcggggtttcactgtgttagccaggatggtctcgatctcctgacctcatgatccgcccgcctctgcctcccaaagtgctgggattacaggcgtgagccaccgcgcctggcctacaaaaagtatttttaaaaattagccaggcgtggcggtgaatgcctgtagtcccacctacttgagaggctgaggtgggaggattgcttgagtttaggagactgaagctgcagtgagccatgatggcaccactgcactccagcctgggtgacagagcaagagcctgtctctgaaataatcatacttggccgggtgcggtggctcacgcctgtaatcccagcactttgggaggccaaggcgggcagatcacctgaggtcaggagtttgagacgagcctggccaacatggtgaaaccctgtctctactaaaaatacaaaaattaggctgggcgtagtggcttatacctgtaatcccagcactttgggaggccgaggcaggcggattacctgaggtcaggagttcaagaccagcctggccaatgtggtgaaaccccatctctactaaaaatacaaaagttagccaggtgtggtggcaggcgcctgtaatcccagccactcgggaggctgaggcaggagaatctcttcaactcaggtggtggaggttgcagtgagccaagatctcgccactgcactccagcctgggcgacagagtgagactgcgtctcaaaaaataaaaatacaaatacaaaaattagctgggcatggtggcacacgcctgtaatcccgtctacttgggaggctgagacaggagaagcacttgaacccaagaggtggaggttgcagtgagctgagatcacaccactgcactccagcctgggtgacagagcgagactccatgtcaaataaataaattaaataatcatactaataaaaaataaagctgaggaaactgaggctccaggcagataaggctgagcagggaatcaaacccaggtgtacctaaggccagatcacatgtggtctgtggctggaccatgtttgccaggcattcgctaggggctgcccctctgccaaggcctggggcaagaacatattggaccctccacctgggctgcaccctgagctgaggaagatgttaggagctgacacccagggggcctgtgtctcatcccgtcttcacaggctcaaggctcagagcctaagtttgatcatgactgagcacttcagagccagggcagcccactggcccttctagaaggttcctaagtcattgcttcatccagcctcccggatgtggcttcatgacagtgtcatgagagctggtcaggggaggcactgcatccccagcctggggtgagaactctagaggcctcaggaaattgctgggtgatgcagggtgaggcagggaggctccagctgagcctcctccctcatcttgcagagatggtgccactgagtcacctcgaagaagaacagcccccagcacctgagtccccagaggtgagtagcagaggctgggggacccccgctcatcttgttctttccagagtggaccaggcacccgcagaaagggctgggtttgccgaggtcttgcatgtagcttaattagcatcggtgactttggaggcaaggtgacggcacgtgggactgccctgccttggaagtcgggtgggggcagtgctggaggggcactggacaggtgagttttgcaggacgtgtaagaatttcccaggaggagggcacagctgtgagcaaaaaagtacagaaagtcagaagctgagttggagaagtttggacaggggaggaggtagcatcgggcaccaggaccagtggtttgggcttgggggcaggagaagccttcccagctctgcagcggggcaggaccctaagcccttcccatcccctagagccgcgccctggtcggccagtcacggaggaagccatgcgaaagcgactttgagaccatcaaactcattagcaacggagcctatgggtgagtccctgagtcctgcatagacccatttcacagatgcctgaggggatggttgaggcccaggcagctcctgcatccccctcctaccccagcagggctcacacattcatccttgaatgggcagagaaggcacctgaggactggagggggaagtggagacacgccatagcgaggttacagcctcatgtgtgctctgtccacgagccaggcctttacctgccccaggtgtagggcgttctaggggcttgggggctgatcaaggaaatagatgcccacccagtgggagtagcacgcagtgagctttatttaggtgctgctttgaatggcaggcttgcatacaagggaagtccctcatagcataagccttttggaggctgaggttccaggagtcaccatcaagagggagaggccggcaagggaactccccgggcagagggggatcagagagggggcttacatgtctaggtgatgttgttcaacagcatgggcactcaatctctgggtcagagactccctgcagggtggtagcagcttagggtcttgaaatccacaaagttcatcttatccatggctcagagatggtgcagtttcacgagtctgcaaagcagacaggctctcagtggctaaaattttgcttacttggtctgtgtgtaaaacaaacggatgtgtaaaactttgagtttggtgctagcggtcttttaaaagagctagaccaggtgcggaggcactttgggaggccaaggtaggaggatcgcttgaggccaggagttcgagaccagcctgggcaacatggcaaaactccatcaatactaaaaatagaataattaactgggcgtaatggcacatgcctgtaattccagctacttgggaggctgaagttggaggatcacctgaacccaggaggcagaggttgcagtgagccgagatcaccccactgcactccagcctgggtgacacagtgagaccatctcaaaaaaaaaaaaaaaggaaagaaagaaagaaagaaatacacaagcagccaggtgcagtggctctcgcctataatcccagcactttgggagcccgaagtgggagggtcacttgaggccaggagtttgagactagcctccacaacatagcgagaccccatctctacaaaaaatttaaacattagccaggttctgttgtgggaggatcatttgagccgggggggtggtaaagactatagtgagccgtgatctcatgactgtgctccagcctgggcaacagagtgaggcgctatctcaaaaaacataagataaaataaaaataaaagaaacatacaacctagaggccaatatacaagggccatgtgcagcccatttatatggcccccagccatggtggcttaaacccaaaggtggctgctctgggagggggaacaggtaaggagaatgggtggcccaggtggagggcacagcacaggcaaaggccaggcaggttgggatctgggctcaagttgagctgtagtgcctgctggggcctcgatctccggtcccagcaagcctggccctctgtccccagggccgtctacctggtgcggcaccgtgacacacggcagcgctttgccatcaagaagatcaacaaacagaacttgatcctgcgtaaccagatccagcaggtctttgtggagcgtgacattctcacctttgccgagaacccctttgtggtcagcatgttctgctcctttgagacccggcgccacctatgtatggtcatggaatacgtggaaggtacgctcactggggcttgcatgcctccagcgatggggagctcacccctccacgcctgggagaaaatttttagaccaagttgaggtctgttctgtcctccatgaggtctcaccctgctttggggaaccctcaggaaccccagtctggggtagggagcccagccatgggggtttagggctggaggagcccagacaggagtgtgtgaggatgggaccctggaggcaagaggagggtggccatcctaggtggggggaactgatgggcagaggcctggagaccagaagtgaaggcagggagatgtatggttcaggcaggtaaagtactattaccaaagtactgccaggcgagagagcgaacatgcacttaggagacaccagctgtatacagcactaattgctgccctgtcggggagaatcagaaggcagggtctcagcttggcgcgctggctcacgcctgtagtcccagcactttgggaggccgaagtgggctgatcgcttgaggtcaggacttcgagaccagcctaagcaacatggcgaaacccccattcacgcctatagtcccagctactcgggaggctgaagcaggagattcgcttgaactctagaggcggagcttgcagtgagccgagactgcgccactgcactctagcctgggcaacagagcgggcaacagagtgagactctgtctcaaaaaaataaataaaaatttaaaaaataggccaggcgcggtggccaacgcctgtaatctcagcactttgggaggccaaggctggtggatcacgaggtcaagagatcgagaccatcctgaccaacatagtgaagccccatctctactaagaatacaaaaattagctgggtgtggtggtgtgcgcctgtaatcccagctactctggaggctggggcaggagactcgcttgaacccgggaggcggaggttgcagtgagccgagatcgcgccactgcactccagcctggcgacagagcgagactctctctcaaaaagaagaaaaaattaaaaaattaaaaataaatgaaggtagggtccgccccttccctctcccccgaccctccccgctgagatagaacaaactggggaccttttgcaggaggtaaagcgaggaggatgcataggcattgggcataacctaaggggcgggcggggggcgggggtgccccgggcctcatgactacatccgcccttctcccaggcggcgactgcgccacgctcctgaagaacatgggcccgctgcccgtggacatggcccgcctgtacttcgccgagacggtgttggcgctggagtacctgcataactatggcatcgtgcaccgtgacctcaaaccagacaagtgagctgagctagcatgagcggggcctcgcggagggcggggccagagaggatcaggggcggggccaaagaggatcagggcagagcctctgaggtgcatcccgggacccttcaggagccccatctgtctgagctctgttggtacctcctgacaggaaggcagggaatgagcgcatggtgaacatcttgtgtgtacagaggagaggagagcagacacttaataggcgtctgctgtatgcaggggaaggccggtgcacttatggaggtgctgccaatccaggggagaggatgtgcacttaggatgcacacactgtatacaggagaaggggctgcgcacccagagctgctgctgcacaaggggagagaacatgcacttataagacaccaactacacacacagaacaggattatgcaatttgcgagaccttacatgtaaagacagtgaccgtgcatgtcttgagcacctgctgtatattagtgcaggaaagcaaggaagagaacgtgtttactgagagccttaggatgtttattttattctggtaggtggtaagcacctactgcatgccagaccctctgtgggcaactgggagacacagggccacctgctttgaaacccctgtattattttctcctctgcatttattgagcgcctgctgtgtgcagggaaaaaggaatgcctgtttgtcaggtgtcctcgagatacgaggcaagaactgacatttctcacatacatgtgtggagatgtgaacatgagtgttaagagccttgcatgtaggccaggcttggtggctcacacctgtaatcccagcactttgggaggccaaggcgggcggatcacctgaggtcaggagttcaagcccagcctggccaacatagtgaaaccttgtctctactaaaaatacaaaaatcagctgggagtggtagcgcgcacttgtagtcccagctactcaggaggctgaggcaggagaatctcttgaacccggcggaggttgcaatgagccaagatcgtgccactgcacccaagcctgggcgacagagcgagactccatcttaaaaaaaaaaaaaagcgcctcgcatgttttcagggcattttgcagttggcaagtggcttagaaaacagacatgtatgtggcacctgctgtatacttgggcctgtgctcgatgctctaaggaactcagaagcatgaataactccttacacactaacgttgggtttctatatcacattttcttggttggcatgtacttgttaggcaccaggtgtatacaaaataggcagaagaacagttattaggcaatgactgtgtacctggcccagaacactttatctttatttatttatttattttttgagacagggacagtctttgtcgcccgggctggagtacagtggcgcagtcttggctcactgcaacctccgcctaccgggttcaagcaatattcctgcctcagcttcccgagtagctgggattacaggcatgcgccaccactacgcccagctaatttttttttttttttttttttttgagacggggtctcactctgtcgccaggctggagtgcagtggtgcgatctcggctcactgcaacctcagagtccctggttcaagcgattctcctgcctcagccttccaattagctgggattacaggcatgcgccaccacgcccagataatttttgtatttttagtagagacggggtttcaccatgttggtcaggctggttttgaactcccgacctcaggtgatctgccggcttcggcctcccaaagtgctgggattacagttgtgagccactgcgcccggcaaatgaactcatttttaaaactctcacgcaagtacagtatatactgctgtttaggttttcctatggacttaaatatataaatgttttgctacatcatagtgtcttatgcaccagctgtatgaagtcgcatttccgtgcaccttctgggtgcatctgccacttaaaaatacattccagagaattcactgtgtataaccatcatttaatgaactatgtagtcagtacctcctgtttgctccagctctgtaaagaaacaattctgtgccggcactttgggaggccgaggcaggtgaactacctgagatcaggagttcaagaccagcctgaccaacacggcaaaaccccgtctctactaaaagtacactaaaaaaatatatatatatatacacacacacacatatacgcacacacagtagagaccaggcatgctggctcacacctgtcatgccagcactttcaaaggtgggaggattgcttgaggccagcaattcaagaccagcctgggcaacatagcaagaccttatgtctacaaaaaaaaccttagctgggtgtggtggtgtgcacctgtagttccagctacttgggaggctgagcaggaggatcgctagggcccaggagttggaggcagagctctgcccatctcaggcggagccaaggtctagggcagaaggggaggccaggcaccccagccccccagctctgagcacactcctaacctgcccacagtctgctcatcacctcgcttggccacatcaagctcacggacttcggcctgtccaagatcggcctcatgagcatggccaccaacctctatgagggccacatcgagaaggacgcccgagagttcatcgacaagcaggtgggcgggcaggtgggtgggcagccccgggatgcctcctcctctctcctgggacctctcttgggctgggggctggcctcagtttccccgttctccctggcccaggtgtgtgggacgccggagtacatagcccccgaggtgatcttccgccagggctatgggaagccagtggactggtgggccatgggcgtcgtcctctatgagtttctggtgggctgcgtgcctttctttggagatacccccgaggaactcttcggtcaggtggtcagcggtgcgtttcctccacgggcctgggtttgagctgcagccccaccagagctctgggcagcggtcctccacccgcatgtcagggagagaagcaggaagaggggagggagttggatgccaggtggggaggcggtggggtgctgagtgaggcgggtggctggattaattatagggtcacagaggcttcactgaagtgacttgtgaggctgggcacagtggcaaacacctgtaattccagcactttgggaggctgaggcgggaggatcatataaggtcaggagtttaagaccagcctggacaacatggtgaaaccccatctctactaaaaatacaaaaattagccgagcatggtggcgggcacctgtaatcccagctacttgggaggctgaggcaagagaatcacttgaacccaggaggcagaggttgcagtgagctgagattgtgccactgcactccagcctgggtgacagagcgagactccatctcaaaaaataaaaaaaagaagtgacatgtgagcagagacctgcaagaacctgagaatgagagaaagccatagagacagaaaagagaaaggtggctctgagcatagggcacagctgtggcaaaggctgtcagtgggtaccaagcctgccacgttgcaggggcagaggaggccagtggcttggagtacagtgaagtgaggggaaatggtggatggtactagaaaggggtaccctgccttctccctccctccctcattttacctccctccctcattttagatgagatcatgtggccagagggagatgaggcccttccagcagacgcccaggacctcatcaccaggttgctccggcagagcccgctggaccgtctgggcactggtatgtagtgtgggggagaacccaggtgggtggctccttcaggccctgggacccagggaatggagggatagcgcccggggtagacaagagttctacttgggaagctgcatggaggagggggtttgcagctagggttttgaaggatgcacaggagttctccaggaactatcacaagaccttggaaagaatagaaagtagctgggtctggtgcccatatggagcactgagcctgaataagtgtgtgaggctgtaaagtcaccaggacctgtgtcaaaggcccagcccagaagatcccactgtcccagttttcccagccacctggttaatcattaagggaccgtttgagactcatgcagccacccatcacgtggccactatggctcctgttcatgactgaggctttgctatgggagacggttgggtccaaggtcggggatcatcacctgctctgtggagcagaagtgggagaagcccgggaaggaggccctcgtaaggctctgggctttctctaggcggtgtggtcccagatggcagcagagagaagggcagaatctttggaacctgggcagcctgggtgcttttttatttttttgagattagatctcactctgtcactcaggctggagtggagttgcacaatcttggctcactgcaacctccgcctcccaggctcaagcgatcctcccacctcagcctcccgagtagccggaaccacaggcatgtgccatcatgcccggctaatttttatacttttggtagagacgaaattgagacgaaatttcaccatgttgcccaggctggtctcaaactcctgacctcaagtgatctgcccgcctcagcctcccaaagtgctggcattacaggcatgagccaccatgcctggctgctggcctgggtttgaatcctggcttcgtccctctccaggctcctaaatgacagcggatttttgttcccatttttctggttctttgttgttgttgttgttgttgttttttgagacagagtcttgctttgttgcccaggttggagtgcagtggtgctatctcagctcactgctgcaatctccacctcccaggttcgagcgattctcttgcctcagcctcccgagtagctgggaatacaggcaccagccaccacacccggctaatttttgtgtttttagaagagatggggttttgccatgctggccagactggtctcgaactcctgacctcaggtgatcctcccttcttggcctcccaaagtgctgggattacaggtgtgagccactgcgcccggcccatttttctggttctgtgttgtccctactatgtgtccagcatgggcagtgggggtaggggggcatcctgtggcgggtgaggtgaggacctgcagggctcagcggggcatatctgcaggtggcacccacgaagtgaagcagcacccctttttcctggccctggactgggcagggcttctccgacacaaagccgagttcgtgccccagctcgaagctgaggatgataccagctactttgacagtaaggagggatccccctggagggggggcggggggtgctctgccatccctcagtccctgggggcagagggctgtgtgccaggcattccacccgagcttggcacctcaccttaggcctggagcttccgacttcctgagccttccaagaatctagggcgtgtgtcggccgccccctggctggatttcctgtgtgtctgggctcaggaggccacagcatccctcaggcttcagaaggagaaaccaaggcaccaagtgtggcagacccttgtctggggttccccagcaagttgggcctcctgggtgtccgtccctgaccaggcatggggccccatctgttacccaggagggtagggcgcctagtgcagcttttttggaggcgtccctgcaggggcactgtaggtgagctctgaggaatgactctctctctccccacttggggttcctgcccttcagtgtccagcacctccttcagaacttgcttcatgtcagaggtcttctctgagcttctgtttcctcttctgtaaaatgaggaacatcctttatgttggagatgcacaattttggccaggcgcagtggctcaagcctttaatcccagaactttgggaggctgaggtgggcagatcacctgaggtcaggagttcgagaccaggctgcctgaccaacatggagaaaccccatctctactaaaaatacaaaaaattaggcaggcatggtggtacatgcctgtaatcccagctatttgggaggctgaggcacgagaattgcttgaacccaggaggtggaggttgcagtgagctgagatggcactattgcactccagcttgcgcaacaagagcaaaactgcctgaaaaaaaaaaaaaaaaaaaaagatgcgcaattttacctaattctgtgtgacccatttcaaggaatcactgaagctcagaaataggaattcccgcccctggtcccacaacctgttttttttttttttgagacggagtctcactctgtcgcccaggctggagtgcagtggcgcgatctcggcttactggaacttctacctcccggtttcaagcaattatctgcctcagcctcccgagtagtcgggattacaggtgcctgccaccatgcttggctaattggtcccacaactttttaattatttattttttgagatggagtcttgctctgtcacccaggctggagtgcagtggtgcgatttcgactcaccacaacctctgcctcccgggttcaagcgattctcctgcctcagcctcccaagtagctgggattacaggcgcttaccactactgcccagctaatatttgtatttgtagtagagatggggtttcaccatgttggccaggctggtctcaaactcctgacctcaagtgagccacccaccttggcctctcaaagtgctgggattacaggcgtgagccaccgcacccggccccacaactttttagggacacagctggtgttgatccccagatatctgctctgccgcccaagcctcccgtggtccttaaacacaccaggcactgtcccacctcagagcctttgccctggcagtgaccctatcctgagatgccctccccgtattgccacaccgcccttgagatcatctctgggcatcaggcgtgctgcatgtgcctctccctcccacagcacgttcggaacgttaccgccatctgggctccgaggacgacgagaccaatgatgaagaatcgtccacagagatcccccagttctcctcctgctcccaccggttcagcaaggtgggcccgggtcccgaggggagccactgctcagaaaacattgcatgatgtctgtttgctttcgtatctgttttttgattttgctttgttttgttctgtagagatgaggtcttgctatgctgcccaggctggtctccaactcctgaactcaagtgatcctcccacctcagcctcccaaagtgctaggaattgtattggttttttgttttgttttgtttgagatggagtctcgctctgttgcccaggctggagtgcaatggcgcagtctcggctcaccgcaacctctgccttccaggttcaagcgattctcctgcctcagcctgccgagtagctgggattacaggcgcatgccgtcacgcccagctaatttttgtatttttaatagagatggggtttcaccatgttggccaggctggtctcaaactcctgacctcaggctatcctcctgcctcagcctcccaaagtgctgggattacaggcatgagccaccacacctggtcaaatttttttgtattttcagtagagatggtgtttcaccatgttggccaggctggtctcaaactcttgacctcatgatctgcccgcctcggcctcctaaagcgctgggattacaggcatgagccatcgcacccggccttgtatttttttattttgttttgttgttttaatttgcttttgttttagccattttttttttttctttttttttttttgagacagagtctcgctcttttgcccaggctggagtgcagtggcgtgatctctgctcactgcaagctccgcctcccgggttcacgccattctcctgcctcagcctcccaagtagctgggattacaggtgcccgccaccacgcccggctaattttttgtattttcagtagagacggggtttcaccgtgttagccaggatggtctcgatctcctgacctcgtgatccacctgcctcggcctcccaaagtgctgggattacaggcgtgagccaccgtgcccggcctgttttagccattttaaggcaatttccgaggcaggcggatcacttgaggtcaggagttcaagaccagcctgactaacatggtgaagccctgtctctactaaaaatacaaaaattagccaggcggtggtgggtgcctgtaaccccagctactcgggaggctgaggcaagagtattgcctgaacccccagaggtggaggctgcagtaagctgagatcacagcgctgcactccagcctgggcgacagagcgagactctgtctcaaaaaataatgataataataaagtgtacaatttcgtggcattcagcacattcataatgttgtgcaaccatcacctctatctagctctcaaatgtttgattcccccaaaaatttgtacccattagcaaccactccccatttgtcctccttcagcttccatctttatggatttgcctgttctgggcatttcatatcaatgcaattcacactatgtggccttttgggtctggcttctcttactcagcatcacgtactcaaggctcatccctactgcagtgtggaccagtgcttgcttcctttttatggctgagtaatattccatcatatggatggaacacattgtttatccacccatctttgatgcacatttgggtctattccaccttgtgaatacaggtaccattttagtttatttacttatttatttatttattgagatggagtcttgctctgttgcccaggctggagtgcaatagtgcaatctcagctcactgcaacctccaccttctgggttcaagcgattctcctgcctcagcctcccgagtagctgggattacaggtgcgcgccaccacacccggctaatttttgtatttttagtagcgaccaggtttcaccatgttgcccaggctggtctcaaactcctgtcctcaagcgatccgcctgcctcagcctcccaaagtcctgggattaaaggcatgaaccaccgcacctggccctggatgttattttataacctcacgagcttaacttacattccctactttttttatgatctgatcaaaaaatgctccactctgctttaggcctgggccccaggcaggactttctagtcaacagcaaaaacgcagcttggtagcctggcccctgagcctcagtttttccatctgtacaatgggctaaagtctatgctcttttagggatgtggggagtgaggatttagagaagtgactcatactgaagcaactggtacataggaatcactggactaagccagctttctttttttttttttgaaacagagtctcgctctgtctcctaggctggagtgcagtggcacaatctcggctcactgcaacctccgccttctgggttcaagccattctcctgcctcagccttccaagtagctgggactacaggcatgtgccaccacgcccagctaatttttgtatttttagtagagacgggttttcaccatgttgaccaggctggtcttgaacgcctgacctcaagtgatccgcccacctcagcctcccagagtggtgggattacaggcataagtcaccaggcctggtctaagccagctttcttgccacctttgttactggtttttttgtttgggtttctttttttttctttttttgagacagggttttgctatgttgcccaggctggtctcaaactcctgggctcaagtgatcctcccagctgggcctctgaaagtgctgggattacaggcatgagccaccgcacccggcttaccattcttttgtcttgcctcccaggtctacagcagctctgagttcctggccgtccagcccactcctaccttcgctgaaaggagcttcagtgaagaccgggaggaggggtgggagcgcagcgaagtggactatggccgccggctgagtgctgacatccggtaagtggcctggggaagtgtaggcagatccagcttccaagcctgctgggaggtagagacacaaaatctgatgcaaagggagcttcctagtggccaagtagaaaagggtcaaacatattgaccagcctatcaggtccctggcaaccttgctccctttggctctgtgttcctcaccatgcaaacataaaacagctgtgtaccatcatgctgctaggcacacttttccttctgtccagaatgccctttgcttactaactcctgttcatccttcaaagctcagacccaacagaaacagtcaatgtctgctagaggatgggtgttggaagctggccttttttttttttttttttttttgagacggagtctcgctctgtcgcacaggctggagtgcagtggcgcaatctcggctcactgcaagctccgcctcccgggttcacgccattctcctgcctcagcctcccgagtagctgggactacaggcacctgccaccacacccggctaatttttatatttttagtagagacggggttttgccatgttagccaggatggtctcggtctcctgacctcgtgatccgccctcctcaacctcccaaagtgctaggattacaggcgtgagccaatgtgcccggccttttttttttttctttttttaagagactggttctcactctgtctcccagactggagtgcagtggcacgatcatagctcacttcagcctcagactcctgggctcaagagatcctctcaagtagctgggactacaggcgtgcaccacggcacccggctaattttttaagcaattttttgtaggccaggtgcagtgacttacacctgtaatcccaacactttgggaagccgaggcaggtggattacctgaggtcaggagttcaagaccagcctggtcaacatggcaaaaccccatctctactaaaactccaaaaatttagccgggcatagtggtgcacgcctgtaatcccagctacttgggaggcttaggcacgagaattgcttgaccctgggaggcggaggttacagtgagccaagatcgtgccactgcactccggccggggtgacagagcgagactctgtctcaaaaaaaaaaaacaaaacaaaaaacaaaaaattgcagagatggggtctccttatgttgcccgccctggtctcgaactcctggcctcaaacaatcctcctgtctcagcctcccaaagtgctggaattataggtgtcagccactgcacccagcctggaagctgggttttaaaagttgaataggaagccgggtgcagtggctcacgcctgtaatcccagcactttgggaccccaaggcaggcaggtcacttgagctcaggaattcaagaccagtctggccaacatggtgtaaccccgtctctactaaaaatacaaaaattagcccagtgtggcggcaggcacccataatcccagctacttgggaggctgaggcaggagactcacttgagccctggaggcagtggttgtagtgagctgagattgcaccactgcacttcagcctgggtgacagagtgagaccctgtctttaaaaaaaaaggtgaataagcggtctccaggtggacagagaggacagtgcagacagaaggaactcgtcctgtctatgcaaattacccttgactgcagactgagagttaagatgtggccatgaaggtggctgagtatcctggggtgcaggtgcctggcaggggtgatgcaggctcttcctccctgcaggctgaggtcctggacatcctctggatcctcctgtcagtcatcttcgtcccagcccgagcggggtcccagcccatctctcctgaataccatcagcctggacacaatgcccaagtttgccttctcatcagaggatgagggggtaggcccaggccctgcaggccccaagaggcccgtcttcattctaggggagcctgaccccccaccagcggccaccccagtgatgcccaagccctcgagcctttctggtaagtggggccctgagtaagagggatgatgtcatggaagtttcccagaggaggggctatttgagatgggttttcaaggatgagtaggagttctccagagccaacaaaggctttaagagaggagaagccagggtcccagagagacccccagcccccaaggaaccccagtctagggtaaatgcccccagcttcatagagtcaggatgggacccctagctcccaagatgggggaactaagggtctaaatgggtgtggaggaaggcttcctggaggaggggacttgaagacttttgcatagagaataatttgggaagggagtgcaggaagagggaactgcatgagcaaaggccaggaggctggactgtgtaaatagtgaccagggaggaagggccttaaggtccctttaggaccacatggtgagtttgaggggcacccagctgaccctgctgaccctctagccgacacagctgctctcagccacgcccgcctacggagcaatagcatcggcgcccgacactccacaccaaggcctctggatgccggccggggccgccgccttgggggcccaagagacccagcccctgagaagtccagagcctcctccagcggtggcagtggtggcggcagtgggggccgcgtgcccaagtcagcctctgtctctgccctgtccctcatcatcacggcaggtaatgcccaaggcccctctcacctttgtctgtctgcacccattttcaccaacagggtgggggcccttcctgagttggggaggctggggatgagccccagaagaggggaggaggagtaggacacatggagagctggggagatggtgttcccagtagagggcactgcacgtgcaaaggcctggtggggtgaccatgcttgggacattgaagcaacagcaaagtggccagggtggtcgttgtggtgggaaagagggggccccaggggagacctgtgagggagtgagtgaccccctccctaaccccctgcagatgatggcagcggcggccccctcatgagccccctttccccgcgctctctgtcctcgaacccgtcgtcccgtgactcttcgccgagccgagacccgtcccccgtgtgtggcagcctgcggccccccatcgttatccacagctctggcaagaagtacggcttcagcctgcgggcgatccgcgtctacatgggtgatagcgacgtctacactgtgcaccacgtcgtctgggtgagtgccgagtgggaatggcagggacccgggttctagtttgactctgcccggtcatgtcccttctcagagctgcattttggagcctggcagggttaggtagatagagctggtgccaccgagttcatctcggtccctgtcatttggcagggaggaggtcagatgagagagacaaggatggatggatggaagctcacagatcccaagtggcattaacctcccagctccatatggggacgcactgggcatgttatcctccctctcccagcccaagggcgtcgaggcatgccctccctattggttgctccctgaacagacacagaaggctttctggagaagggggcgtaggagctggggctttgatgggtgagtaggagttcccccaggatcagggaaactgagacagcacaagaggcagcagcttgctggggtcccacagcagacccagcctgggctggggtccccagatgtggggcccaggccattgaccccaccgttctcgtctgcccccagagtgtggaggacggaagccccgcccaggaggcgggcctgcgggctggggacctcatcacccacatcaacggggagtcagtgctggggctggtgcacatggacgtcgtggagctgctgctgaaggtgcggcacccccactgcccaccctcagggctccccagcaccccttggccgcagctcccggttccccgtggttctccgcgtccagacacacaaccccacattcaatgtcaactccaggcctggcacatccacttccttcggcccagaatacatgtccttcttcagcccccaacatcaccccttagagctgctcctccaggaagccctcccttctccctgggcaccctcacatctgttcctccctctggcctgaggcctggaggtaggagatgggctcaagacaggaggaagggccgggcgcggtggcacacgcctgtaatcccagcactttgggaggccgaggcaggatgatcacctgagctcaggactttgagaccagcctgggcaacagagcgagacccccatctctgcaaaaaattaaaaaataaaattagctaggcatggtggcatgcgcctatagtcctaggtacttaggagtctgaggtgagaggatcgcttgggccgaggaggttgaggccatagtgagctgtgatcgtgccatactgcactccagcctgggacacagagtgagaccctccctggttctaaaaaaatagagggctctcatgtgggcagctgcatgggtggttcattgaatagctggacactgggtaggtgtctttggcctaatgactcatgggccattaggtgagtgattgggggatggggagatgttggggtgattaatgggtggataccagataggtgggtgacagaccccgggagggtggagagtgaagagggcaggcctcgatcggcgttgaccgcagagggaaggatcttagcaggaggggtggtgctccctgggctattgtttgaccggatatattgggtaggtcactggttgtgtggatgaatggatgctggggtggtgggtcccagctggtgcccggagtgaaggggacatagcagctgcctggcaagtgctgggccctgtgagaggcacagaggcaacccctcaccatccctcccgcagagcggcaacaagatatccctgcggaccacagccctggagaacacctccatcaaggtgggccccgcccggaagaatgtggccaagggccgcatggcacgcaggagcaagaggagccgtcggcgggagacccaggatcggtgcgcggcagtgaccaccagggagcggtacacagggggcggggccacggggactggggttctttttttcttttctttttccttttttttttttttttttttttgagacagagtcttgctctgttgcccaggctggagtgcagtggctcaatctcggctcactgcaacctccacctcccgggttcaagcgactgtcctgcctcagccccctaagtaactgggactacggcgtgcaccatcatgcccagctaatttttatattttcagtagagacagggtttcgccatgttggccaggctggtctcgaactcctgaccttaaatgatccatctgcctcggcctctgaaagtgctgggattacaggtgtgagccaccatgcctggccaggagcaggggttctgaagcctccggttttcttaccccaggcggaagtcacttttcaagaagatctccaagcagacctccgtgctgcacaccagccgcagcttctcctccggactccaccactcactgtcatccagtgagagcctccccggctcgcccacccacagcctctcccccagccccaccactccctgccgaagcccagcccctgatgtcccagcaggtgggtgcaccccgaccccccaccaccccggctaccctgggagcaagggctggtgggccccaggagggaggaaggagttcaggggatggaatgacacgatgtagggaaaaagatgaccgggatcctggtgtctagcagggaacctgggagtacttagagacgaatgcaggtgccagggaaggatgcacccagcagaggaaacatcatggacaaatggggctagacaggagggtgggaaaactgagaagaggccaggcacggaggctcacgcctgtaatcccaacactttgggagcccgaggcaggaggatcactgagcccaggagtttgagaccagcctgggcaacacagggagaccccatctgtacaaaacataaaaaaattaggtgggtgtgaggccgggcatggaggctcacacctgtaatcccagcactttgggaggccgaggcaggtggatcacctgaggtcgggagttcaagaccagcctggccaacatggagaaaccccgtctgtactaaaaatacaaaatcagccaggtgtggtggcacatgcctgtagtcccagctactagggaggctgaggcaggagaatcgcttgaacccaggaggtggaggttgcggtgagccgagattgagccattgcactccagcctgggcaacaagagcaaaactccatctcaaaaaaaaaaattaggtggttgtggtggtgcacacatgtggtcccagctactctggaggctgagatgggaggctcacttgagcccaggaggtcaaggctgcagtgagccatgattgcaccactgcactccagcctaggcaacagagtgagaccccatctcaaaaaacaaaagggaaaaaaaaaaagaaaacagaagtgatacagagaaggctttctggaggagggggagtaggagctggggctttgatgggtgagtgggagttcaccagagctaggccaaggaaacaaccctgagcaggaggcagaaaagtctggcatgaaccaggcatgatggctcatgcctgtaatcccagcactttgggaggccaaagcaggcggatcacttgaggtcaggagtttgagaccagcctggccaacatggtgaaaccccaactctactaaaaatacaaaaattagccagatgtggtggcacatgcctgtagtcccagttacttagggggccgaggcacgagaatcatttcaacctgggaggtgaaggttgcagtgagccaagatcatgccactgcactccagcctgggtgacagagcgagactctattgaaaaaaaaaaaattagccagccatggtgacgtgcacctgttgtcccagctactcaggaggctgagttgtgaggatcacttcagcccaggaggttgaggctatgattgagccagtgcactacagtctgggcaacagagcaagaccctgtctcaaaaacaaaaacaaccaggcatgatgggtggccacatggaaggatgtgggctttagcagtttttgtcagtcccacagctccacttctgggctggggacattgaggccagcagccctgacctacgcttatcacccacagataccactgcatccccacccagcgcatccccgagctccagcagccccgcctccccagctgctgctggccacacccgccccagctccctgcacggcctggctgccaagcttgggccaccccgccccaagactggccgccgcaagtccaccagcagcatcccgccctccccgctggcctgcccgcccatctccgcgcccccaccccgctcgccctcgcccctgcccgggcacccgcccgcacctgcccgatccccgcggctgcgccggggccagtcagctgacaagctgggcacaggggagcggctggatggggaggcggggcggcgcactcgtgggccagaggccgagctcgtggtcatgcggcggctgcacctgtccgagcgccgagactccttcaagaagcaggaggccgtgcaggaggttagcttcgatgagccgcaggaggaggccactgggctgcccacctcagtgccacagatcgccgtggagggcgaggaagccgtgccagtagctctcgggcccaccggaagagactgatcccctgccaggtctctccctggcatcaaagttacgcgttttcttgtgcaatgttttttccgtaaagtcatgcctggatggggactgagccaccagcctgacacccagaaggcgagaagccatctcggtccttgctggaaggtggagacatcgcttgtgttctggtgtcaatcggggctggatggggcaagaatgggggacaagggtggctttgtaaatagcagcaaatccctgcaactaatttattactttttttttctttttttttttttttttttgagacagagtctcactctgttgcccgggctggagtgcagcggcgtgatctcagctcactgcaacctccgcctcccaagttcaagcgattgtcctgcctcagcttcccaagtggctgggattacaggcgcccaccactatgcccagctaattttttgtatttttagtacagacggggtttcaccatgttggtcaggctggtctcgaactcctgacctcatgatttgcctgcctttgcctcccaaagtgctgggattacaggcgtgagccactgggcccagcctaatttattactttttataagcgatagccgtactgagccgccccctgaaggcggctgccaggtcttgccccaggcacctgggactctgtttgcaggccctgccctctgggctgagaaggatgcactttggacaagtcatctgtgtttgtgttttccagtttttctgtactttttaagtgttttgtgttacctggtctcattcccctccccacacctacccatttgaggggatggagttgaagtcacctggtcacctgtaccggcccagttcggctacaacctggagtgtccgtaaacaattcctctcacccacaaaacaatgtaatcccagcgatggactggattctgaaggccacttcccaccatcatagctgccatgcccaggcagtgcctgctctatatatagagtctgcctccaatcctgctggcttcagcctggagaagggatatgggagctggagctttgatggatgaataggtgttcaccggatctgggcagaggggtcatccgctccccaggtgggcactgataaaggaaggtacaggcctcacctggaactgccaaggcagcctccagaaatgctcggctgtctcggggcacgctccagtatgccagtcctgcgggattacgtccagctacttccagaaacactcagtgtcccctcccctcaggctctgccttggcctggccttgtccagtctaccctggacaagatgccgtgtgtttgaggcccagcagagtaagcccttggccgtgatgtgtctgaaacacctgttaggggttccctccatatgtcagagcctctctgggatgaagttcaagccagaaaacccagtcgaggctcaagtttgaatttcagcttcactgtgtggctctgggaaaatggctttcccactctgtgcctcagtttccttgtgtttacaagactaatcccattgactgtttattaagcacctactgtgtgccaagcgcttttacgtggcttctccctcagccagccttgagaaggctggaggtggtgtcatcacctccattttacagacaaagcagctgagaccccagcgaggggcggagacctgtcccacgatcacccagcaggagtcgtggcagaacggagcatcagccagaccctgttgtgggcgttgtcatcaagggagcttgaatggagggtctggtgtcagatacagccgactccagccccagctcatcccccatgatgctgtgtgacccactgggcactctggtgagggagctttccagacatcaacagcccactctgcttccctttctgagtcccctgtccagcactgcctagtgttggagggtagaccaaggctgtgcatgattcaccccctccttccatcctggagctggcagtgaataaaagcccgtatttacaaagatgagctccaacgtctggatttgtgaggggctgagaaaggaggaagggaagagtggggaggggagcggagtgaaatagacccatggctcaaagtcattgcaagtgggttttgaggactgcatagcagttcgctgttgagattcttcctgatgccatcgctggtaccagcctcctgctaccctctccctgcgagtactccatcatagccctgcctttaaaagcttcctccagacatctgggccctgagctatgttttttatttttatgtttttgagacaaggtctcgctctgtaacccaggttggagtacagtggcgcaatcacggcacattgcagcctcgacctcctgggcgccctgggctatgttaataaaataaataagcggcggggcgcggtggctcacgcctgtaatcccagcactttggaaggccaaggcgggcggatctcctgaggtcgggagttccaaaccaccctgaccaacatggagaaaccccgtctctactaaaaatacaaaattagccgggcgtggtggcgcatgcctgtaatcccagctgctcgggaggctgaggcaggagaatcgcttgaactcgggaggtggaggttgcggcgagccgagatagcgccattgcactccagcctgggcaacaagagcgaaactccgtctcaaaaaataataacaaaataagcaatcgtcgcgtcctttctatcctggtcttagcttgcgctctgccataaaactccctctagccgaacccggcccagccctagagcaatccgttacttccggggcgctcagccggcatgcaaacactcttggctacagccccatctccgagtgcgttcggctatttccggaaaccgtcggcatctaggctcaagtccgctaaattctagtgcccgtaggggtcgagatcgttggctgtttccggacgctctgggttgccatggaaactccttcaaccctggctttctccgacttctgctttttgcggcaggccctttccccactctactgccccctgtttgctgagcttgagaacgcctcatttgtcccctggaaccatctatgcttcagtaattcccataagctggcggtcgcctctgggtctaaactcccaaggcctccattgggcactgagcacattcggttatttccagaaacgctccgcggtcttggggatcagcctcagttgtgccagtgcggccgtagagagtgttcggccatttccgaaagcgctcgggcgtctctaagcccagccgagcccagtctcggatccctcgccgacccgattgcactcggctacctctggaaacgctcggctgtctcgggggcaccctctagtccaccagtcccgcgggattacgttcggctacttccggaaacactcgggtgcccccttacctcaggctccgcctcggcctcggttcatccgcccggctcgaatgcgctcgggcatttccgccgggggcgggccaggccgctcggaaccgtggcggcggcggaggcggggatcccgcggctgcggcgacggtggccgcggtggagccacggggcgggcttggcttggtgtgacggcggctgcggcggcggtggcggccgcgaccaggtgagtcctgactggccctcgtggcgggggcggctgggagtgtgcttaaatgcggggcgcccgggggcagtgccgggccccggtggaagccagaacgcaagcgccaggctgcgtcgggccccgcgggaactgggggggccgcaggcaagggggggcctcgggctcggctccgcagcggtgcagcctccttgggacggtcggggcagaatggggagagactccccgcgtccaagataccggactggagccgaggccccaaatgaagggaggccctgcctggaatggggcttcgaatagtaccgaggggcgcccaggcattgtgcggggcagaatggggtgcgggagggccgggggtcgaacccacttccggtcccctagccgggtggccgggtccacgcagacccaagtgcgcgtctgtgtgagcgctcaggccctgccttcacccgcggagcccccagccctgcctgccccgcccctcccgcctcccggattcggggagcgctgctcccggggcgcgcacaccggggcgtgggggcgggctggcaggcagatccaggcggttttctgggcatcccctctcggggcctcagtttccccacctgtagaatgagggtaacagaggcctaggaatgggtaaattgggcacccgagaatgtggcgcccctccgccctgctcggacacctcttggggttccccgtgactgaaggatgctcagagcctccacctgacactcgggcctcttggtggatagcacctatccttatagccaccctgaatccttgacaagcaacttaacccactgccaaggctttgcatgtgccgttccgtctgcctgtcgcgccttcctatccgctgtgatgatccattctctagaacagcacgtccatcccccgaccctagccctgtccatcacagggcgtctgaacccgcagggctaggctgggaatgtgtgcctatctccgcctccccaggctgggactcctggggaataatcaatgccctgctgccggcagcctcccctcctcctcagctgcagtacccccaccttctcctggctccctgtccctgcctggggctaaggttccttctaagcacctccccatctgcattttgtgcctactctgggccccaggctggagctacctgccagcccactcactcctcctctgcagagactggaggtccatttgcttggactcacctcgaggcctttgcttgtgtagaggcctcttcctggactttgttccctacctcttagttcagctggcctgacccctctatggagctcccaaagcacccggagtggcctccattgcgtcctccctgccctaggtatctggccacctggctgctgccccctcatgtccaactgggccaagtcggcagatctaggtgtaagtcctggcttcctcctggcctactgcacggccctagatacctccctgctctgagcctcagtttccccatctgtaacaggggtgatgaaaagcctgtttactggccgggcgcggtggctcacacctgtaatcccaacactttggaaggcagaggcaggaggactgcttcagcccaggagtttgcgaccaacctgggcaacatagcaagaccccacctctattggaaaaaaaaaaaaaaaggctgggcaaggtggctcatgcctgtaatcccagcactttgggaggccaaggcgagcagatcacttgaggtcaggagttcaagaccagcctggccaacatggtgaaacctcgtctctactaaaaatacaaaaattagctgggtgtggtggcctgctactcgggaggctgaggcaggagaattgcttgaacctgggagacaggttgcagtgagctgagatcacaccactgcactccagcctgggtgacagagcaagactctatctcaaaaaaaaaaaaaaaaaaaactgatttactgagcatgtagtatacctggggcaggttcttgggaactctactcccagcagctccaagggaaggctgtcagtatacccattttacagatagagaagctgaggccctgagagggaccggccccaaggtcacccagtgattcagggaattccaaatcaggatttgggcccatctccgtgttgggggtgagaggagttggcctggctaacgctgccctatccctgtctccctaggtcggcgtcctcagctggccgagcatggtggcagcctgcacccttggctcccttgtctggtgcagccagcagagccgccagccttgggcgcccatggccctccgtgtgagggcgtgagcggcctgccccagcctcacctgctgatggaggactcaatggcccagtgacctgacaccacaccaccaactccctcccaccagctgacgaatggtggacccagtgacgagtggcccttgtaagggtcatggaataatttgaagcgaggcatgagcggcccctgtggtcgcctgtgactgctggagatagaggtcccagcaccccaagccaacccagcggaccctcccagccctgcttcaaccaatggggccagtggggctccaagcagccacctaaccatccagaccccaccccactcacgcggccatggcgggccctgagggcttccagtaccgcgctctgtacccgttccgccgggagcggccggaggacctggagctgctgcccggcgacgtgctggtagtgagccgggcggccttgcaggcgctgggcgtggccgagggtggcgagcgctgcccacagagcgtgggctggatgcccggcctcaacgagcgcacacggcagcgaggtgacttccctggcacctatgtggagttcctggggcccgtggccctggcccggcccggccctcgcccacggggcccccgcccactgcccgccaggccccgtgatggggcccctgagccaggtgagcagcaagcaggggccctggaaaggggggtggtcccctcagacccttggtctcctcttctgtccagtgaggcaatgggatctccaaggaaggaggaaaaaggacatttggtcatttgacaagtgtcttcagtgctaggctcagcagtggacacaaggcctgttcctgccctcatgagcttctggttcaagaagggatgagagtgggttcaggaggtgacacatgccatgaggaagggggcttgcgtgggaagatgcgagggtggaagctcaaggcagtgggggcagcgagggcagaggctgtggagtagaactctaatggcgggaacggccagcaggaggaccagagggaggaaggggagggcaatgtgcgctggcatggaggacttagtgggattgattttgaggacaatggagagtgttcagtaggattcagaggctcagcctagcttcatcctgccttttgcagacagggtcccttgaagaacccctttggagaccctgatttccaaaatgaagccacaaggagggtaggatgtgggctgctcagctgaggccacacagcacagtgggatatgaggaccccacatccctcttcaaagacccttggccatcaccacttgccaggggtgtgccaggtgtagagaatcgggggcaccgagcccactcagtgactgctgtttgatgggcagggagtgtgggctctggccggggaaactgtggcccaggttgcaaggaggaggctaagaggtgctgcatgctcggcatggtctgctccgaccctcccagcagcccagcaaaaggccctgtgtgcagaccgggaggcctgagtgcaaggccgtcaaatgccgtacttgaaaccagttggtcacccagggaggccaaagccccgggaggtgccaggcctgctttgtgccagggtgacattgcccaaaggcaaaccagagtcccccagcgcagggcggaatagggggtgctgaggtggtgcgacgctggccccagcctccaggcatctggtatctccagggcccaggcctgcgtcctgcctcggcctgaaggagcaggaggtggccccgtctgggctcccagccagaatctgcctctccccctggtaacagccacctccctcctctgcctggcctctgtccagccaccatacacggccccacgtggggcggctgcccagccccaccctctgaatcttccagggttatgtgacctcggccagaacccgccccctcgaggcctcagtttcctcatctggaaacaacagggttggtccctggggatgctgggacccaacccctcggaaatgtgctgaagtcacctgagccccacctggctgtgcacccacgggggaggttgcagcccctctgacccacaattcctcacctgcaaagtcggggtgatgcagttctgatgggaaccccctccccattctgcagattgatcccaggccactctcagggttgagtttcccaacccaccggccagagtgtcacccacctccacctcctccttgtccttttcctttttttttttttttttggcgttttcgttgcagctgggcctttctccagcttgaggcgccacctggcccatcactcagggaggccccgcaggccccggcttgcccctgctgtgtgccagggcgtccccgccgagggccagagcagcgtccaatggtggcagacagcgagctgctgaggcggggatgctgcacacaaaaggccctgtagtgctgggaagccagggctgggagggggctgggcccaggatgccgccggcacccgctaggaggggtttcagcttttccaaaaggggagcaataattttctttcttttctaaattttaatttggggaagaaataattttttagaagcaaaatgattaagaaaacgggtcatggtccttggaaggaagctgttctgacccaggccgggatatttttcttttctttcctttcaaccacttttttgtttgcatcaagaagggagaagcgggccgggcacagtggttcatgcctgtaatcccagcactttgggaggccaaggcgggtggatcacttgaggtcaggagttcaagaccagcctggccaacagggtaaaaccccatctctactaaaataatacaaaaattagccaggcatggtggcacccacctataattccagctacttaggaggctaagtcacgagaatcgcttgaacccgggagatggaggttgcagtgatccaagatcatgccactgcacaccagcctgggtgacagagcaagactccatctcaaaaaaacaacaacaacaacaacaacaaaaaacgaggaggccaaggcaagtggatcgttaggggccaggagtttgaggctgcagtgagctaggattgcgccactgcactccaacctgggtgacaaagcaagaacctgtctcaaaaaaaatgagaggcaatgtcattggcccatttttcatttgaaggaactgaggcccagagagggcaggtcctgtggccaagattgcacagcaggttgtggcagagcccaaacctgctatatgactttcagtggctgccgcaaaaattaccaccaactaggtggcttcaaacaatggaaatgttatttattaattaatgtatctttttgttttgttttgttttgttttgagatggagtttcgctcttgtcgcccaggctggagtgcaatggcgcaatcttggctcctgcaacctctgcctctcgggttcaagcgattctcctgcctcagcctcccgagtagctgggattacaggcacgtgccaccacgcctggctaatttttgtatttctagtagagacagggttttaccatgttggtcaggctggtctcaaactcctgaccacaagtgatatgctcacctcggcctcccaaagtgctgggattataggagtgagccactgcgcctggcctcctttttttttttttttttttaaattatttaagagatggggtctcactctgttgcccaggctggtcttgaactcctggactcaaaggatcctcctgccttggcctcccaaagtgttgagattacagacgtgagcctttgcaccccaccacaacagaaacttattctgtcatgtttctggaggctggaagtccaaaatcagggtcgtgccccctctgaagtttccttccttgcagcttctggtgcctccaggcattcattcctctcatgcatgggttgattattccagtctctgccttggctttctcttcttttttttgagacagagtctcactctgtcacccagactggagtgctatggcatgatctcagctcactgcaacctccgcctcctgggttcaagcaattcctgcctcagcctcctgagtagttgggattacaggtgcgcaccaccacacctggctcattttttttttgtatttttagtagagatggggtttcaccatgttggccaggctggtcttgaactcttaacctcaagtgacctgctggtctcagcctcccaaagtactaggattacaggcatgagccaccgcacccggcctgttgacttatttttgaaacggagtcttgctctgtcgcccaggctggagtgcagtggtgcaatcttggctcactgcaacctccgcctcccgggttcaagcgattctcctgcctcaacctcccgagtagctgggattacaggcacccaccaccacgcccagctaatttttctgattttagtagagacaggttcgccatgttggtcaggctggttcgaattcctggcctcaggtgatccacccacctcggtctcccaaagtgctgggattccaggcttgagccgccatcctggccggctttctcttgttacaaggacatcagccagtgggtttagtgtccaccctaatgccaggctggtctcatgtacagattcttgctttccttacacctgcaaagacctatttccaaataaggtcacaggtaccagggatgaggacttggacatatctttttggggactttattcagcgcactccacctagtctgtgaagttgtgtgaactcctcatattctaacccagaaaattgtgtcccatcaattctgccctttcccagcccctccacccaaggtcttgcagcctcctgcggatgggagtcaaggtgccaagcacttgcctgagctgggccctgcctcaaactgccccagctgaggttcagccagcaaagagaggggctgggctccttccaggaaccccaccaacatgcaacccccctgtttcccccaccaggcctcacactccccgacttgcccgagcagttctccccacctgatgtggctccccctcttctggtgaagcttgtggaggccattgaaaggacaggtaagttccagcctggctgcagcccctggattctgcttgcttacctctagtgacaggcgactcatcctctcacagggcctccaagctcatgctgcacggaaacaggctgagcctggatgccctgggcctctatgttgaatagggcacagagtgactcctaagggaagatgggaaggtgaacatgaccaggccactgcatgtgctgtgccctctcccagttctccctccccacccctcccatgcccttatctctgggcagcaaagggagactgcaggggggttgagcggccagtccaggcctcacgaggtcggggcagcatttgagagctgactcgcctgtccccttcacccccagggctggacagcgaatctcactaccgcccggagctgcccgcaccgcgtacaggtgaaggggagcctcaatggggttgggaggaggctgggggccccagtacacatgagttggacgtgtgcccccctgcacccgcagactggtccctgagcgacgtggatcagtgggacacggcagccctggctgacggcattaagagcttcctgctggcactgcccgcgccgctcgtgacccccgaggcctcggccgaggcgcgccgggccctgcggggtgagcctggcgggtagcccgggggaaggagggggctgtagcgggtgggagggcccaggcctggctcaccctgccctggccatctgtccgcagaggccgcggggcccgtggggccggcgctggagccaccgacgctgccgctgcaccgcgcgctcacgctgcgcttcctgctccagcacctgggccgcgtggccagccgcgccccggccctgggtcccgcggtccgggccctgggcgccacctttgggccgctgctgctgcgcgcgccgccgccgccgtcctcgccgccgccagggggcgctcccgacgggtgaggggcggggcggagccggagcgagcaggggtggagtttggggtggggcgggcggggcatggccagagtgagcggcgtctagaccctaagaagggaggggatggggtccagagtgagaagctgcgttcttgtgatgacggagcggagacctgggctcctgagtcgtgggacagaaggtgaaggggcctagtcccgaagcatgtgggtggtgcctgcaccttcccttctgctcgtcgcagctccggtactggtctctcgctcgcctttgtgtgagaatctatggagcacttactgcatacagctatgagggagctggcctcgcacatgtgcctgtatcatctcctcctccgccctgcacatactgtctcgtatatacccccaggcgtgcaagcgcacgcacaatcctgtgcacatgcgtgggcggacaggccctacccagccctcaccacactccccttccccctaaggagtgagcccagccctgacttcccggcgctgctggtggagaagctgcttcaggaacacttggaagagcaggaggttgcgcccccaggtgagtcccctgtattgctgtcatttcttcccgttgggggccgtaaatactgatccctgagtgctgccggcatcagcaggctggttgcagtgggaggcagccacagtatacagtcggtgctcaggatgcatttgttttcctgtcccccagcgctgccgcctaaaccccccaaggcaaagccggcctccacagtcctggccaatggagggagcccaccctccctgcaggatgctgagtggtactggggggacatttcaaggtaggttgctggcagggggccagggaccaaggaggtgtcacagggtgagcggggtctccaggtggctcggcagtcccaatgttggatgttcccacagggaggaggtgaacgagaaactccgggacactcccgatggcaccttcctagtccgagatgcttctagcaagatccagggcgagtacacgctgaccctcaggtgggggcctgtccctgcaaggataaccgggggtcacaggtcacagagaccgggagttcagaggggatagaacatgtgcggtttcaagaatggagggccaggcacggtggcttacacctgtaatcccagcactttgggaggctgaggctggcagaacacctgaggtcaggagtttaaaaccagcctggccaacatggtgaaaccccgtctctactaaaaaattaaaaaaaaaaattagccaggcatggtgatggatgcctgtaatcccaactactcgggaggctgaggcaggagaattgcttgaacccgggaggtggaggttgcagtgagccgaaatcgcaccactgcactgcagcctggacaacagagcagcaagactctgtctcaaaaaaaaaggggacagggattgagggtcaggtgcggggtcccactgggtgccgacacccctctcctcccccaggaaaggcgggaacaataagctgatcaaggtcttccaccgagatgggcactatggcttctcagagccactcaccttctgctccgttgtggacctcatcaatcactaccgccacgagtctctggcccagtacaatgccaagctggacacacggctcctctaccctgtgtccaaataccagcaggtccgtgctggcctgggagccagggagggtagcacctggctggccccaggcctcagtttcctaggtagacccgaccaggctatgcatctcccctcattccgccacgtatctccaggaccagattgtcaaggaggacagcgtggaggcagtgggcgcccagcttaaggtctatcaccagcagtaccaggacaagagccgcgagtatgaccagctttatgaagagtacacacggacctcccaggtactccaggccccgtacatgagggaaaccgagacatagaggggcagtggcaaggccgggagcaggatgaccaaccccagaggacttgaggatgaatatccagttgcaggtcacagagcaggcacttagcaccaagggctgttctaaaaacatagaaataaggccaggcacagtggctcccgtctgtgtacttgggaggcagagacaggaggatcacttgagcccaacagttcaagatccttctaggcaacatagggagacccgtctacaaaaaaatttaaaaattaactgggtgtcgtggtgcatgcttctactcccagctactcaggaggctgaggtgggaggatcccttgagcctgggagtttgaggctgcattgaattgtgatcatgctgctgcactccagcctgggtgacagggcacgaccttgtctctaaaaacagaaataagcgtacgaggctgggtggggtggctcacgcctgtaatcccagcactttgggaggccgagatgggtggatcacctgaggtcaggagttcgagaccaacttggccaacatgttgaaaccctgtctctactaaaaatacaaaaattagctgggcatggtggcggacgcctgtaatcccagctactcagaggctgaggcaggagaatcgcttgagcctgggaggcagagattgcaatgagccaagatcgtgctactacactccagcctgggtgacaagagtaaaactccatctaaaaaaataataataattaaaataaaaaaataagtgtacaagcttttacaaaaccaaaaaaggacagatgagaagggcccaaccagcctcacaggagtggctgagccaggacctggggagtgtccaggatgagcctatctccggctggccctcagttttcccatctgcagaatggaaccaggcaccttgattacttatgtccccttcaaccaagatgttattcaaaatgaaatcatgccaggtgcagggcgcgcacctctaatcccagctactcggaaggctgaggcgggaggatcgcttgagcccaggagttcaagactagcctgggtaacatagcaagactttgtctcttaaaaaaataaaataaaaattaagtgaaaggttttgtcactcaaggactgtgctaataagcttcttttgcaagttaagagggaatagattcaggtggaacagctgggaattcctcagtcgtccctagtaccctaagggttttctgtcctcttttttttgttttgtttttttttttttgagacagtgtcttgctctgtcatccaggctagagtgctgtggcatgatctcagctcactgcaacctccgcctccctggttcaagcgattctcctgcctcagcctcccaagtaactgggactacaggcacgtgccaccatgcctggctaatttttgtatttttagtagagatggggttttgctgtgttggccaggctggtctcgaactcctggcctcaagtgatctggctgcctcggcctcccaaagttaaaaaaaaaaaaagaaaaaaaaaatttaataaaattaaaaggtaggccgggcacagtgactcatgccagtaatcccagcactttgggaggccgaggcaggcagatcatctgaggtcaggagtttgagaccagcctggccaacatggtgaaaccccatctctaccaaaaagataaaaaaattagccgagccaggcacaatggctcaagcctgtaatcccagcactttgggaggctgaggcaggtggatcacgaggtaaggagttcaagaccagtctggccaacatggtgaatccctgtctctactaaaaatacaaaaaattaggcgtcatggcatgcacctgtaatcgcagctactcaagaggctgaggcaggagaatagcttgaacctgagaggtggaggttgcagtgagccgagatcacaccattgcactccatcctgggacagagtgagactccgtctcaaaaaaaaaaaaaaaaaaaaaattagccgggcatggtggctcacacctgtaataccagctacttggaaggctgaggcaggagaatcacttgaacccaagaggcagaggttgcagtgagccaagatcacgccactgctccagcctgggcgacaagagcaagactccatctcaaacaaaaaaaattttgaggtgctgtctcaccatgttgcccaggctggcctcagactcctcagggttcaagagatcctcccactttagcctccctactagctgggattacaggcattcgccaccacccctggcctctgtcccctttttactgatgtgttagctgaggctctaaatggacaagacagttgtccaggatcagttaggagcactgtaacctcagaattgactttggccctgagcctcagtttctctgttaatagttgttactttgttaggggttgttggaagggtccatgggacaaagtaaggaaagtcgtagtgcggcatctcccccaagaagccctgtgagctgtagcaactagatctgtcattcattcttagcagtgttaacaggtccaggtgtttgtggatacctataggaggatgtaaagaagaagagggtttggggggtggggttttgaaggctgaataggagttcatttggtgcagcaggcgttagaagaatgacactctgatagagggaccagcttgagcagtctccgtatcagagttgagatgtgcctttacccctcacgagggccttttggggagtcccaggaggtgctgagctgcgccccctcctccaggagctgcagatgaagcgtactgcaattgaggccttcaatgagactatcaagatctttgaagagcagggccagactcaagagaaatgcagcaaggaatacctggagcgcttccggcgtgagggcaacgagaaagagatgcaaaggtgagtctggcgcctctgccctgccccaccccaccctgatctggtgcagtacaagccagggagggaaggaagcagaaggaggccagccacttggaggcaaagagtagtctgttgaaatggactttgggcctggtgcgatggctcaggcctgtaatcccagcactttaggaggccgaggcgggtggatctcctgaggccaggagtttgaaaccagcctggccaacatggtgaaaccctgtctctattaaaaatacaaaaattagctaggcatgatggtgcgcacctgtagtcccagctacttgggaggctgaggcaggagaatcgcttgaacctggagttggaggttgcagtgagccgagattgcaccactgcactccagcttgggtgacagagaaagactgtctcaaaaaaaaaaaaaaaaaagaaatgggctttgaaggatgaataggagtttgctagaaagagaaatcagaggaaacagcatatgcacaggctcagaggctggaagcacatagtctggtgcaaagtaggtccttgagaaaaccctggaggccgggtgcagtggctcattcctgcaaccccaacactgtgggaggctgaggcaggaggattgcttgatcccaggagtttgagaccagcctgggcaacatggcaaaatctacctctacaaaaaatattaaaatgttagccagacatggtggtgcacacctgtggtcccagctactcgggaggctgaggtaggagggtcacctgagcccaggagtttgagggtgcagtgagccgagataaaaccctgaggtctctgcgccaccccacccctcccacaggatcctgctgaactccgagcggctcaagtcccgcattgccgagatccatgagagccgcacgaagctggagcagcagctgcgggcccaggcctcggacaacagagagatcgacaagcgcatgaacagcctcaagccggacctcatgcagctgcgcaagatccgagaccagtacctcgtgtaagtggcggctccatacttccctgcggctccctggcgactgctgcggcacatggagatctctctaggagtctcagtctctctctctccaccaagtggcccttcctgggccccgagaccccttaaactcggttcctcccgggccccttgaaagttttcccataggtcagcctcagcttagtcagaggtgtgtgcaatgggagtgtcactcctatcccattccattttgtggaaagttggaagccttccacaaaaattcctgctgggctgggcgcaatggctcacacctgtaatcccagcactttgggaggctgaggcgggcagatggatcacttgaggccaggagttcaagaccagcctggccaacatggtgaaaccccgtctctactaaaaataaaaaatacaaaacccggccaggcatggtggtgggcgcctgtaatcccagttactcaagaggctgaggcaggagaatcacttgaacggggaggtggagtttgcagtgagcagagattatgccaatgcagttcagcctgggcaacagagcaacactctgcctcagaaaagaaaagaaaaaaaaaatcgcctgctgtgcaacctaccatgctgggtggctgcggcagccctgtcctgggttcaaatcagttcaaatcctgcccccacccaccaacctcctgaagacctcagccagagcctccacctccctcttgggcctcagggagggcactgtcgcgtgccaggtgctgtgctaagcaccgtgctcgttatgagttcatttggtccttttcaagccctttgtaaagtttgccctttacagctggggagactgaggcacagaaccgacagctgccctgtgcaaaggccagcagtgctggagtgagcctctggtgatgatgaggggcctgggctggcatcttcttgggggactccataggcgttaacagaaacaaaaaaatgaggggtgtgggtcagggttccccagcagagctgggcgagccaccctgggttcaggctgccctgagccaggtcagctctgccctcttgtggcaaccggagatattgtacccagaaccctctctcctcagccagaccctgcctcccaccggacaggcccactgtgggctcagcacccacacaactgcacaagcccacctttcctgttccttctcaggtggctcacccagaaaggcgcccggcagaagaaaatcaacgagtggctggggattaaaaatgagactgaggagtgagtgaccgtctggagggaggcagggagggcttcccagaggagggggccatttggggtgggtttcgaagaatgagtaggagttcaccagggaggaaaagttgtccaggcagctggggagcctcggaggctggcaggtgagtgaccagggccctccccgccaccgccccccaccccagccagtacgcactcatggaggacgaggacgatctcccgcaccacgaggaacgcacttggtacgtgggcaagatcaaccgcacgcaggcagaggagatgctgagtggcaagcgggatggcaccttcctcatccgcgagagcagccagcggggctgctacgcctgctccgtggtgtgagtggaccgcagcggtggggattcccgcgtccctcccagagctctcattgaatgcctgccgcgtgccaggccttgggaaggagtccctggtggggtcatccgggacaggggagcacgcggccctggaacggggaaagcttggcggggaggccagccttccgactccccctctcgtctgcccccacagagtggacggcgacaccaagcactgcgtcatctaccgcacggccaccggcttcggcttcgcggagccctacaacctgtacgggtcgctgaaggagctggtgctgcactaccagcacgcctcgctggtgcagcacaacgacgcgctcaccgtcaccctggcgcacccagtgcgcgccccgggccccggcccgccgcctgccgcccgctgagcaccgaggacccgccccaagcagagccgcccctgggcccgtctgcgccggaggctgcggcggcgggagccacggaccagaccagccacatccaggggtcctcatttctccggctctggctcttgtttggggttctctcaccctctttctctttccttccctcccccattctccagatctccctctgtctccttttctctgtctttcttggcccctgtctctctccatgttgggggtcctaactcccccaccccatatctacgtgtcctccgggcattgccctctccatggctctggtcaccctgaccctctgccctgcccaccgcaggtcccccggggtcccggaagccccttctggctgcacctgccatgtttacagagggcccctgggctgcgcggccccagcctgggcaccctgatttttaagccatagacctggggtcagggcaggaaggaacttcactctgctgcttccgagaacctcggccgtgacattcggggccgggcgggacccgccccacagactccaacttcccctccaaaccccgaagtgaaacccgccaccgggttacccccacaagggggccgctgcgagaagttcacccacccccgaaaaaataattaaactcgcaggccaggcacggtggctcatgcctgtaatcccagcactttgggaggccaagacgggcggatcttttgaggtcgggagttggaggccagcctggccaaaatggcaaaaccccgcatctactaaaatacaaaaattagccgggcgtggtggcggccgcctgtaatcccagctacttgggaggctgaggcgtgagaatctcttgaacccaggagatggaggttgcagtgagcagagatcgtgccactgcactccagcctgggtaacagagggagactcctccgtctcaaaaaaataaataaataaacttgtgagctggccccaacccctcctaggaatcacagctccccgtactggtgccgccgcagtggccaagttgcgacactgcccacggcccctccctctgatgcagattcagggcttctcttcgatcatgttgggttttgattctgtttttccttgactgcaaaaccctctttcctctcctcttttgggacaagagccctggttttctacgctgcccttggccaccacactgcctgccccacgagctgggaggcaggttttgtacggtacgttgttattgatatgatataaaacatcaaacgtcgtgggtgattctgttgtcagtgactgggcttcagtaccacctctgcgtgtcggggaccctggtgtctacgggggtcacagcaggtcggacccgtgggtttaactccaagcccctctgagacccgacaacccctccctcccccagtttagctgctcaagcctggagaggttgaggcagtgcccaaggtcatacaggagagagattcgaatcctgagctcccgactgctcaggggaccccagaccccatccagcccctcaagtgcttccaagctgcttcccccgcccaccgcccccaaatttgaatcctgtcgcaaccatcagctgtgtccttgggaaagttgtatcccctccctgatccacagcttcctcattcattgccaagtggcgtcaaaagtcaaaaccctcccatgccacagggaggagtctcccgtgtctttgatgttctcaagtcgtcggcacctccagccagcattggaggctcttctctgacctctcctcacccactcccatgcacagcccgccgggtcccaggagacgctgagcaaaagccctgtggggttttttgtgtttctttttaaagagtcaaggtctctcactctgtcacccaggctggagtgcagttgtgcgaacacagctcgcggctcacagcctcaagctcctggttcccagcctcaagcagtcctctcatctcagcctttagagtcactggattacgggtgtgtgtcaccatgtccagctaattatttttaaatttttttagaaacaagatcttgccgagtgcagtggctcacacctgtaattccagcacttggggaagccaaggcaggcagatcacttgaggtcaggagtttgagaccagcctggccaacatggtaaaacctggtctccactaaaaatacaaaaaaaaattagccagacatggtggcgcatgcctgtaatcccagctacttgggaggctgagataggaagatcagatgaacctgggaggtcaacgctgcaccaagccaagatcgtgccactgttctccagcctgggtgacagagtgagactctgtctcaagaaaaaaaaaaaaaaaaagggtcttgcccttttccaggtgggtctcaaactcctggcctctagtgatcctcccacctcagcctccctgagtcgcgtaagccaccacgcgtggcctcatggcgtctttgacttggactcctgtttaccaccctccccatcacacccagaatccacacccccactgcgacgtcattgtcccttcagccctccccaaccctggggcctcactgtccttgtctgttttgtacagccacctctcaaggcccaacaaggctgaacctggggcaagtgcagaaagaaacctccactctgacccagtctactgctgggaccttgggacaggacctgcctcccttagcctcagagccccctagccttgccaggcactgtccctgccatgtgtcctgtctggagataacccataaataactccagcccagattgtgcctctcactgcataggtgctcacaggagaaaggttgccatctttatgatcccagctatgctgagctgggggtggaagagaatatcccgtgtggtctctaaaaacactcaaccactggctgtgtgtccttggcaaaatagccttccctctctgatcagccatttatttgttaccagctggagtcagtagcacctacccccagccccaactggatgcttctgagggttcaatgataaaatgggttgtaggcccactctatgcctggcaccaagccagagagcaatacattgtagggttacatttatgatttcttccaatagggctggtgcctggtaactactggaaaaattgtagcaattatatttatggttatttcttcaatcccacccggcatagggtaagcaccaaagttggggtggtgagtcttggggagcctttgccaacggtttggtcgtctgagggatgggctcggggaccatccagccactgggacttcagagaagctccggctcccaaaccagctactgtgtgtgtggccagggtcttccccacaactagaggggggcacagctggggactcaggtatatcttccagctgggtgtgggacattttcttccctaggatccgatgtgtcttgccctgaatgtaaggcctggcagggttggaatgtctcagttattcccccaacactccagcctccatctgggccttttttccaggctattctctctgccttcactgttggggccactgtcctgtgtaggcaccaaggcctgaccatgccatccagaagccccagcctgggacaactctcccccacctgcctctgagccctccatggtgactcttgttccccaaaccttatccttctccccattacacagaagggaaagctgaggctctgtcactcaaatccaaagccaggtggactccaagccaccccacccctatcccagacagcacaggctgcctctctcccccatgggcgtcccttgaaggccaggttgccccccaccccccacaagccttgaacgatgaaaagaaggaaggccagttctcttcaccccaagccagaagtggggctgggtgggtaccctagagaaatgacacgccactccctgcgccagcttctgctttccggcgtggctgtggtcaagcctgagtcagtcccacgggaccacggtgaggggtctggagcgtcggggtcaggagtttgaggggggaagggttgaggggcaggatgtgggggttgggtgtgagggaggtcacgggcgagactggagggaggagacctggccacacaggccttgcccactctcgggggcctgaatatttcagttactcccccaaaaccccggcctccatcccatccccagcctccatccgacgtcacccctgttaggtcacaggcccactctgagagtgggtctcgggcctcaagtcccctagccgcccctagaaggtctaggggtgcgtggagacaccaccattcctctcagcctgtgtctgtctcaaaggccccacctcacctcccctaaaggtagtcttgcgccagggctcacgtgcctgggcagggctgattgccaaggggcccaatggcctcgtgactggggacccagcacctggcaggggtgggggtgggacactcagaggaaggagtggaggagggagagacgctggcccgggacccgaggggcgtgggcatcgggaggcgggcccgggttaggggcgggaccgccgcctggttaaaggcgcttatttcccaggcagccgctgcagtcgccacacctttgcccctgctgcgatgaccctgtcgccacttctgctgttcctgccaccgctgctgctgctgctggacgtccccacggcggcggtgcaggcgtcccctctgcaagcgttagacttctttgggaatgggccaccagttaactacaaggtagggacggcgacagggcgggcaggctggagggaacaggcgccctgtcggggcacgcggctccttctttctccccagacttcacaggggaagaccagggccccgaggggacgctgtccctgccgggttcctggaaaaaccctgttcagttcccggcgctgcggccacactccctccgtgccgtttcgctttcgcatcccgcatctgagaggcgcagctgcctccacccgcctagtcccgcccaagggttcaatgagcgcctactgtgtacttttggggcaggagctggggtctccttttgtggcccagggcacaagttcagcagctggccaagggccgccggcatgcattcttgctgctacccttgatgcattcattccagccagggcagggctcgcgtgtctttgggacctattaggcagatgccctagaggctgagcgacttgctcaccgctccagcgacatgggccacccgccacccctcagctgaagccggaagtcagcacctattaggtgccgcctctattcagtcggacttggaaagggttcacgtggatcccttgctcagctcagaggcaaggtctccaggtgaagtgacaagaaatgagcatgggccaaggccggaggcggtggctcatgcctgtaatcccaacactttggaagtctgaggcaggcagatcacgaggtcaggagttcgagaccattctggcctacatggagaaaccctgtctctactaaaaatacaaaaattagctgggtgtggtggcatgtgcctataatcccagctactcaggaggctgaggcaggacaattgcttgaaccagggagtcgggtgttgcagtgagccgagatcgtgccgcagcacaccagcctagcgacagtgagactccatctcaaaaaaaaaaaaaaaagtctcaaagtcaagattccacctggcaagttctggaaggcgtgcaagatgaattgcgtatcacagccccctttctacaagactaccaagtggggttgagagaagtggggaactgcccagggctacacctgcctcccacgccttcctaatccacagacaggcaatctatacctgcgggggcccctgaagaagtccaatgcaccgcttgtcaatgtgaccctctactatgaagcactgtgcggtggctgccgagccttcctgatccgggagctcttcccaacatggctgttggtcatggagatcctcaatgtcacgctggtgccctacggaaacgcacaggtgtgtgggcgctggggaaactgaggcacgtgggcaggggagcaggggacccagcctaccagcaggctctcaccctgctgccttgcaggaacaaaatgtcagtggcaggtgggagttcaagtgccagcatggagaagaggagtgcaaattcaacaaggtggaggtgagcggccccagggccccacactggggtgggggaaaactgtcccacgtacaggaggcaaatacgaggatgccagctctgtcttctgcctcgtgtgctcccatttaatcacatctttattccctatctcctgggtgggtactggtgattattacgagagggtgtcagggtaccctaggccctcttcatgccctctcctgccccctctccaaaccccaggcctgcgtgttggatgaacttgacatggagctagccttcctgaccattgtctgcatggaagagtttgaggacatggagagaagtctgccactagtgagtgacgcccctcactccacccaaggagggggacatgggtggtaaccttccctgcatccaggcagacccaaattcaagtcctagccctgaccactgctgtctgtgcagcccaggaaaacaactacccttctttattttatttatttttttattttttcttgagacagagtctcgctctgtcgcccaggctggaatgcagtggcgcaatcccagctcactgcaacctccacctccagggttcaagtgattctccagcctcagcctcctgagtagctgggattacagttgtgtgccaccatgcccagctaatttttgtgtttttagtagagacagggtttcaccatgttggtcaggcttgtcttgaactcctgaccttgtgatccgcctgccttggcctcccaaagtgctgggattacaggcgtgagccaccgcacccagccctttttttttttttttttttttttttttttttgagacagggttttgctctgtcgcccaggctggagtgcagtggtgcaatcttggctgactgcaaccactgtctcctcagtttaagtgatcctcctgcctcagcttccccagtagctgggactacaggtgtgcaccaccatgcccggctaatttttgtatttttagtagagacagtgttcaccatgttggccaggctggtctcaaactcctgacctcaagttatccgcctgtcccagcctcccaaaggattacaggtgtaagccaccacgcccggccccagcctcccctcttgaagcctccatctctgaatcaggggaatgaatgcaggtctcttaggagcatgagtgatcacagaggacttactggaggaggcatttctgagctgggcatggaaggatgagcaggaatgtgcagagacacagatgatgggatgtggagatgataggacagaccccacctacttccccgggggattgtgaagaatgactcccagagaagtgactcattggctccaatcatttattcattcatcaaacatccgggtcacccaagaggcctcacctagtgacaccctagtcctgcagggttagatcagggctgagagagtggcaaggagagggcactgaggagacactgtggaaggaggatgaagggtgttcctggcagagggatcagcctgtgtggaggtcctgagtaaagtgagatactatgggggtcagaggcagtgggtctggtcttagggatgaaaccaagggagctaggaggcaggagcagcccaagccctgccttaggggcctccactcaagcatgtattgagcacctgctgtttgtgggctttgtcgcatcactgtgaagccaactgtaccctcttctcagtgacgaaacaggcttggctcagggctggtgggcgggaccgttgagataacggggaggaagctgaggcaaccccctgctccccacccacccagtgcctgcagctctacgccccagggctgtcgccagacactatcatggagtgtgcaatgggggaccgcggcatgcagctcatgcacgccaacgcccagcggacagatgctctccagccaccacacgagtatgtgccctgggtcaccgtcaatggggtaagaatctttttagccctcagcttgacactcatagtcccatggagtcagggatggacaagacagagggaccagagataaaggaacccaggcggaggttgcagtgagctgagatcatgccactgcactccagcctgggcaacaagagcaaaacttgatagctttgcatagggaaagagggcattgatgctggggttttgaaaggtgagtaggagtccatcaggcaaaaaaagtatgtattaattcgaagtattaaacatccctagccacccccattgggaaagatgtgccactgatttgcgaggcgggaggcgggggccagacttgggaatatgtgcagccctttctgggctggaaccagggtgcatgggttggggtagctgctgggaatatgcgacccctgtcttgctttgtgcagaaacccttggaagatcagacccagctccttacccttgtctgccagttgtaccaggtaagctgggaggggagcagtgggattcaggtggtgggggtagggtctccttccaggaccccaactcatggccttcacctccagggcaagaagccggatgtctgcccttcctcaaccagctccctcaggagtgtttgcttcaagtgatggccggtgagctgcggagagctcatggaaggcgagtgggaacccggctgcctgcctttttttctgatccagaccctcggcacctgctacttaccaactggaaaattttatgcatcccatgaagcccagatacacaaaattccaccccatgatcaagaatcctgctccactaagaatggtgctaaagtaaaactagtttaataagcccttctggatggtgtaattaatttgataagtcagccattcccccttccccaggcctggcaaaacccgctctctactaaaaatacaaaaattagccaggcgcggtggcgggcgcctgtaatcccagctacttgggaggctgaggcaggagaattgcttgaacccggcaggcagaggttgcagtgagccgaaatcgcgccactgtgctccagcctgggcgacaagagcaaaattccatctcaaaattttaaaaaagtgactggttgtggccgggtgaggtggctcacgtctataattcctgcactttgggaggtcaaggtaggaggattgcttgaggacaggagtttgacaccagctttggcatgaaagcaagaccctgtctttacaaaacatgaaaataaaaagaattagcaggacatggcagcgagcaactgtggtactcgggaggctgaggcaggaggatcacttgagcacaggaggtcaaggctgcagtgagccataattacaccactgcactgcagcctgggccagagagcaagactctgcctctttttttttttttttttttttttttttttgagacggagtttcgctcttgttgcccaggctgaagggaaacgcgtgatctcggttcaccacaacctctgcctcttcagttcaagcgattctcctgcctcagcctcctgagtagctgggattacagacacatgccaccacgcccagctaattttgtgtttttagtagagacagggttcttccatgttggtcaggctagtctcgaactcctgacctcatgatccatctgtctcggcctcccaaagtgctgggattacaggcgaaagccaccacacccagccaagactctgccttttaaaagaaaaagaagggaaagaacatgttcagtgttgtattttttcctactgatggactggtcaaatcatagatgtatatattcttccttcgaggaagtgaggcttaattccactccctacaaatatctttgtttctctttattttgagatggagtctagctgtgttgcccaggctggtctcaaactcgtgggctcaagcgatccttcttgaggatcctgaagtgctgcgattatagacgtgagccagcgtgccgggccctacaaccaccttgacagtgaactagattgagtaacttgattccaaagagtagaacaggaaaagtgaaaaagaataccccggctgtgcgcggtggctcaaacctgtaatcacagcactttgggaggctgaggtgggtggatcacttgaggtcaggagttcaagaccagcctggccaacatggcgaaaccctgtctctactaaaaatacaaaaattaggctggatgcggtgtctcacacctgtaatcccagcactttgggaggcccaggcaggcagatcacctaaggtcagaagtttgagaccagcctggcaaacatggcaaaaccctgtctctactaaaaaatacaaaagttggtcaggcgcggtggctcacgcctgtaatctcagcactttgggaggccgaggcgggtggatcacaaggtcaggagatcaagtccatcctggctaacacggtgaaaccccgtctctactaaaaatacaaaaaactagctgggcgtggtggcaggcacctgtagtcccagctactcgggaggctgaggcaggaaaatggcgtgaacctgggaggcggagcttgcagtgagccaagatcatgccactgtactccagcctgggcgacagagcaagactctgtctcaaaaaaaaaaatttaaaaaatacaaaagttagccatgcgtggtggtgcacgcctgtaatcccagctactccagaggctgagatgggagaatggcttgaacccgggaggcaggggttgcagtgagccgagatcacgccactgctctccagcctgggcaacagagagagaccccatctcaaaataaataaataaataaatacaaatcatcaagtagcaaaggtggcatgttttgaggtggcacgtcctgaacttcctcattccctggctgaattggtggtggagagaaattcagggtagaagttctgaagtaacacatctacagaaggggtagaaaaagacagattagaacaaatagaaaggaataaatataagcacactatgccagatattgtcgaatcagtatctttgtcctgagaataggttagcttggttacacacttgtatctcattttattttatttatttatttattttttgagacggagtttcgctcttgttacccgggctggagtgcaatggcatgatcgtggtcttggctcaccacaacctccacctctggagttcgagcgattctcttgcctcagcctcccaagtagctggaattacaggcatgcgccaccacacccagctaattttgtatttttttttttttttttgagacggagttttgctcttgttgaccaggctggagtgcaatggcatgatctcggctcactgcaacctccgcctcccaggttcaagcaattctcctgcctcagcctcccgagtagctgggattacaggcatgcaccatcatgcccggctaatttgttgtatttttagtagagacggggtttctccaagtcgaggctggtctcgaactcctgacctcaggtgatccgcccgcctcggcctcccaaagtgctgggattacaggcgtgagccaccgcgcccagcaattttgtatttttagtagagacggggtttcaccatgttggccaggatcgtctccaactcccgacctcaagtgatctgcctacctcggcctcccaaagtgctgggattacaagtatgagccactgcacccagccttgtgtctcattttagaaggtggtggcttaggagggagttgggaacctatctaagttaggtctctaaatggtgtgagcaatcaggcatttaatgagcatttcttctttctctctctctctgtctccccaccctcactttccttccttccctttttttttttttttttttttttttttgagacagagtctcgctttgtcacccatgccggaaagcagtggtgcaatctcagctcactgcagcctccaccttctgggctcaaccagagtagctgggactaaaggcatatgccaccatgcctggctaatttttttttttcccgtttgagacggagtctcactctgtcgcccagcctggagtgcagtggcacattctgagctcactgcaacctccacctcccaggttcaagagagtctcctgcctcagcctcccgagtagctgggactacaagcgggtgctaccacacctggctatttttttttttttagtagagatggggtttcatcgtgttagccaggatggtctcgatcccctgacctcatgatccacccgcctcagcctcctaaagtgctgggattacaggcgcaagccaccgcgcccagccacacctgactaatttttgtattggtagtggagacggggtttcgccatgttgctcaaactggtctcaaagtcctggactcgagcgatctgtccgccttggcctcccaaagtgctgggattacaggcgtgagccactgcgcccagctcttcctttcctactctacaggatctggctctgttgcccaggctggagtgcagtggcacaatcatagctcactgcagccatgacctcctggactcaagcaatcctcctgcctcagcctcttaagtcgctgggactacaggctggagtgcagtggcgcgatcttggctcactgcaacctccacctcccaggttcaagtgattctcttgcctcagcctcccaagtagctgggattacaggcacatgccaccacacccaagtgatttttatatttttagtagagacagggtttcaccatttggaccaggctggtcttgaactcctgacctcgtgatccacccgcctcagcctctcaaagtgctgggattacaggcatgagccactgcgccccaccccgaagttcacatttacaaacagattttgaaaacaatatttaagcaggcatactataaaacataattattgttgaaaagcttatttacaagctttcatctcactttcatttaacttacttgtgttcaacaattatgcttaattactcatgaacatttcataaaacattgaaaaaataatcatcatcttaagttacttttcttgttgacaaatcaagtatcaaaaatcaaagaagcaaagaacctaaaaaaataaatatatgggacgcagcaccatggctcacacctgtaatcccagcactttgggaggccacggtgggaggatcactggagaccaggagttcaagaccagcctggccaacacagtgagatcccatctctataaaaaatacaaaaattggccaggcgtggtggctcgtgcctgtaatcccagcactttgggaggctgaggcgggcagatcacctgaggtcgggagttcaagaccagcctgaccaacatggagaaaccccatctccattaaaaatacattagctgggtgtggtggtggtagctctaatcccagctactcgggaggctgaggcagcagaatcgcttgaacctgggaggcagaggttgcggttagccgaaatcacaccattgcacttgagcctgggcaacaagagcaaaactcaatctcaaaaaaaaaaaaaaatagccaggcctggtggctcacacctgtaatcctagctactcgggaggctgaggcatgagaatcacttgaacctgggaggctgcagtgagctgagatcatgccactgcactccagcctgggcgacagagcaagaccttatctcaaaaaataaccatccaaggaaccaaaaaaaattaaaaacccacatatgggtctctcctttactttttaaaattaattttattgtcaggcttgacatccattaagcaaatcacctttttttttttttttttcagacagggtctcactctgtcacccagactggagtgcagtgaggtgacatcacagctcactgcaacctctgcctccagggctcaagcgatcctcccaccccagcctcccgagtgtctggaactacaggcacaagccacaacactcagctaattttctatatttttagtagagacagcttttcactatgttacccaggctggtctcaaactcctggactcaagcaatccgcctgccttggcctcccagagtgctgggattgcaggcatgagccaccgtgcccaccctcaattcacttcgtaaaaatttttttatttattttttgagacagggtcttgttctgtcacccaggctggagtgcagtaatgtgatcacagctcactgcaacctccatttccagggctcaggcgatcctccctgctcagcctcccgaatagctgggacaacaggtgcgagccacgagccagcatgcgtggtaaatttttgtattttttttttttttttttgcagagatggggttttgccatgttgcccaggctgttcttgaactcctggcttcaaatgacctacctccatcagcctcccaaagtgctgggatggatgacagatctgagccaccacctggccaagcaattcacttttattgcatgtattgttcttaggtttattttatagttttacagtttacacttttataatcttcaacatctaaagataacataagcctgtttgactagtcttaatttacataagcaaatgtggttttctaaagtcaatgaaatagagctcctttacaagttaatctttaggaattccatcaagagggagaaagtgttacatacctataacatatatatatataaacataaataggtgcagtcagaaatcttatagctttcattttaaaattatagctgtgagacaggtgtgataatacaaaactcactagtttttaaaaaaatggtggagccgggcacagtggctcacgcctgtaatcctagcactttgagaggccgaggcaggcagatcatttgaggccagggagttcaagaccagcctgggcaacatggagaagccccatctctactaaaaatacaaaaattagccaggcgcagtgactcacgcccataatcccagtactttgggaggccgaagtgggctgatcacctcaggttgggagttcaagaccagcctgaccaacatggagaaaccctgtcgctaccaaaaatacaaaattggccaggtgtggtggcacatgcctgtagtcccagctactcgggaggctgaggcaggagaatcacttgaacccaggagacagaggttgcagtgagctgagatcgtgcctctgcactccagtctgggtgacagagccagactcaatctcaaaaaatataaataaataaataagtgagatccaatttgcatctgcagaggcagatgaaatgagttaagattacctactcagatcatgaaagctttgtgctaacatttgtaaagactgttaaaatttttcacttgccagttggtttccaaattgccctctgagaacacagttctgatccattgcaggggagccccaaattttgggcttagcccaggagggctcttggcttcttctaggaaagtatccaagggtgacctggtggtgttatacagcacctttttttttttccctgaaagagtcttgctctgttgcccagcctggaatgcagtgatgtgatcacagctcactgcagtctccaaatcctgggctctagaatcccctttgcctcaaacttctgagtagctgggactacaggcatgcaccacctatccgagctaattttttaaatttttgtggagatggggtcttgctatgttccccaggctggtctcaaactcctgagctcaagtgatcctcctgcttcagcctcccaaagtgctgggatcacaggtgtgagccataatcccagcctgataagaattcgtccttttcttttttttttttgagacggagtctggctctgttgcccaggctggagtgcagtggtactttctcggctcactgcaacctccatttcccgggttcaagcggttcttctgcctcagcctcccgattagctgggattacaggtgcctgccactacgcctggataatttttttgtatttttagtagagacggggtttcaccatgttggccaggctggtcttgaactcctgacctcaggtgatccacccacctcggcctcccaaagtgctgggattactggtgtgagtcaccgtgccagcctttttttttttttttttttttttctgagacaaagtctcactctgttgcccaggctggaattcagtggtgctatctcagctcactgaaaccccagcttcccaggtttcagtgattctcctgcctcagactcccgagtaactgggactacaggcacacaccaccacactcagctaattttgctattttttggtagagatggggtttcaccgtgttggccagactggtcttgatctcctgacctcaagtaatccacccacctcagcctctcaaaaagctgggattacaggcatgagccaccgcgtccggctgaattcttactttgcattggcttgtcaggtcccagcatttctcccctgcagaccccagagggagcagatattcccagccaattgtagcccatcctcatcaccagaaactagcagggctagagctttcctcctctctctggtgtctggctcagactgacagacagattaacaaaacaatagcacacaaagcttattcattgtagatgggagccctcacgagaaaaatggagaccgaaaaaagtaactagacctaagtgtttgttttgagacagggtcttgctgtgtcatccagactggagtgcagtagcgggatcacagctcactgaagccttgacctctcaggcccaagcaatcctcctgtctcagcctcccaagtagttgggactagagttgcacaccaccacacctggctaattttttaaaaattttggccgggcacggtagctcatgcctgtaatcccagtactttgtgaggcagaggctgggggatcacctgaggtcaggagttcaagaccagcctggccaacatgataaaacccgtctctagtaaaaatacaaaaattagccaggcgtggtggcgggcgcccataatcctagctacttgggaggctgaggcaggagaatcacttgaacctgggtggcggaggttgcagtgagctgagatcgcgccactgcactccagcctgggcaacagagtgagactccttctcaaaaataaagaaaaaataaaaagatagatcacagagcccttctgggctggctgcggtggttcgtgcctgtaatcctagaattttgggaggctgagatgggcagataactgaggtcaggggatcaagaccagccagaccaacatggcaaaaccccgtctctactagacatacaaaaattagccggccatggtggtacatgcctgtaatcccagatacttggaaggctgagataagagaatcacttgaacccgggaggtggaggttgcagtgagccaagatcatgccactgcactccagactgggcaacagagtgagactccctctcaaaaaaataaaaagaagagcccttcttgcatccactgtttgcaagtgtgtttaactcaaaattctcaatatcaatatgccaaagttgtatgctggtatgttatgggtgacatgtcctgaacactatcaacagaaacatacaaaaattactgccaggtatcaaaagctgctcttcctgggaagcaataaagtatcttttgtttttctgtttttgagacagagcctggctctgtcgcccaggctggagtgcaatgacaagatctcggctcactgcaacctttgcctcccgggttcaagtgattctcccgcctcagcctcccatgtagctgggattacaggcacccgccatcatgcctggctgatttttgtatttttagtagagacggggtttcactatgttggccaggctggtcttgaactcccgacatcaggtgatccgcctgcctcggcctcccaaagtgatggaattacagccatgacccaccgcacccagccccataaattctcttaattttattttttattttactttttgaggcagggtctcgctgtgtcatccaggccagagtgtagtgtcaccatctcagccagctgaagactcagcctctgggactcaagcgatcctcccacgtcagcctctcaagtagctgggactacaggtgtgcactaccgtacccggataattttgttatccggtcttaccatgttacctggtcttaccatgttgcccaggcatctgggcaactccaactcctgacctcaagcgatcctcctgcatccaggtcccaaatggtaggattacaggcataagccaccgagcccggccaagcaacaatttttttttttttttttgagacaaaatctcgctctgtcgcccaggctggagtgcaatggcatgatctcagctcactgcaaactccgcctcccaggttcaagcgattctcctgcctcagcctccaagtagctcagattacagacatgcaccaccacacctagctaatttttgtatttttagtagagatggggttttgccatgttggcctgactggccttgaactcctgacctcaagtgatccacccgccccagcctcccaaagtgctcggattacaggcatgagccaccgtgcctggccaataaattcttaatttatccaccattgtctctcagcaaccagtaatccatttgtagattaccaaatggtcagctcaatgtcaaacaaaactatgggagaccactgttttggactgagctcctgcactaggcaccaacagaccagatgaaaccagaatggagtcactcgtgctaaatgccacataatcaaactgaaactttgaggaagcagacatatcccaaacagatcagtttcttattttttttttttttaaatttgttttgtagagatgaggttctggccaagttgcccaggctggtcttgaactcctggcctcaagcgatcctcctgcctcagcctcccaaggtgctggtattataggcatggtccactgtgcccagctgtctttcctaaaaatagattttagtctacctgggccgggcacggtggctcatgcctgtaatcccagcactttgggaggccgaggtgggcggatcacaaggtcaggagatcgagaccatcctggctaacatggtgaaaccccctctctactaaaaatacaaaaaattagccaggcgtggtggctggtgcctgtggtcccagctactggggaggctgaggcaggagaatggcgtgagcccgggaggcggagcttgcagcgagccgagatcgcgccactgcactccagcctgggcgacagagcgagactctgtctcaaaaaaaaaagattttagtctacctgaattagcccgataaggaagtcccctctgctttaacacttaccaaaaaaagtaacctgaagttaatcaggtttttctttttctttctttctttctttctttttttttttttttttttttgagatagagtctagctctgtcgccaggctggagtgcaagtggcacgatcttggctcactgcaacctccacctccccgggttcacgccattctcctgcctcagcctctctgagtaactgggactacgggcgcccgccaccacacccgtctaattttttgtatttttagtagagacggggtttcactgtggtctcgatctcctgacctcatgatccgcccacctcggcctcccaaagtgctgggattacaggcgtgagccaccgcaccggccttattattattattattttttaagatattctgtagttatggattggaaaaatccatattgtcaaaatgtccatactacacaaagcaacctacagattcaatgcaatttccatcaaaatacaataccaatgacattcttcacacaaaacagaaagaacagttctaaaaaacagtcctaaatttatatgaaatcacaaaagaccttgaatagccaaaactatcctgagcaaacagaacaaaactggaggaatcccattacccaacattcaattatactatagatctacagtaacaaaaacagcatagtaccagcacaaaaatagacacatacataaatggaacagaatggagaacccagaaccaaatccatacatctacattgaattcttttttactattattatactttaagttctgggatccatgtgcagaacgtgcagaaggtgcaggtttgttacataggtatgtatacacgtgccatggtggtttgctgcacccatcaaccggtcatctacattaggtatttctcctaatgctggccgggtgcggtggctcacgcttgtaatcccagcactttgggaggccgaggcgggctgatcacgaggtcaggagatcgagaccaaggtgaaaccccgtctctactaaaaatacaaaaaattagacgggcgtggtggcgggcgcctgtagtcccagttactcggagaggctgaggcaggagaatggcgtgaacccgggaggcggagcttgcagccagccgagatcgcgccactgcactccagcctggatgacagagcgagactccgtctcaaaaaaaaaaaaaaaaaaaagaagttatttctcctaatgctatccctcccctatcccaccctctgacaggtcccggaatgtgatgttcccctccctgtgtccatgtgttctcattgttcaactcccactttctttttctttttttttttttttgagacagtctggctctgtcacccaggctggagtgcggtggcgcaatctcggctcactgcagcctctgcctccagggttcaagcgactcccctgcctcaccctccggagtagctggaatcacaggtgggggccaccacacccagtggtttgtttgtttgtttgtttgtttgtttgtttgttttttgagacggagtctcgccctgttgccaggccggagtgcagtggtgagatctcggctcactgcaacctccacctcccgggttcaagcgattctcctgcctcagcctcttgagtagctgggactacaggcgtgtgccaccgtgcccagctcatttttgtatttttagtagaaacggtgtttcaccgtgttgaccagattggtctcaatcacttggcctcatgattcggacgccttggcctccctaagtactgggattacaggcctgagccacctcgcccggcattgatcaggttttttttgtattgttctgtttatttgtcccactttacgaaactcactgttctcctattgcccagggggacatgtcattttatctattctcagtaactcatgcctgtaattccagcacttttggatgcaaaagtgggcggattgcttcagtacagttcaaggctagcctgggcaacatagtgagaccctgtctctactaaagaggaaaaaaaaacaaaacctttctttaaataaaagttttaaattgggggaaggaaggaagaaggctctatctcaaaaaaaaaatcagaaaaccatgaagggtgtcctctgactgggcaaatttttgttgtaaaaacccatattgtaggctgggcatggtggctcactcttgtaatcccagcactttgggaggccgaggcaggtggatttgagatcaggggttcaagaccagcctgagtaacatggtgaaaccccgtctctacaaaactacaaaaaatagctaggcatggcggcgggtgcctgtaatcccagctactcatgaggctgaggcaggagaatcgcttgaacctggaaggcaaatgttgctgtgagctgatattgtgccactgcactccagcctgggcaacagagtaagactccgtctcaaaaaaaaaaaaaagccatatttcagttttactttttacaggccaacaaatggcatgattgtgtttcaatgacgtttggcttattctatgacctgaaaattatatgaaatgcaaatttgtgtccataagtaaaactttattgaaacacaatcatgccatttgttgacaaaaagagtgaaactctgtaaaatatgggccgggcgcggtggctcacgcctgtaatcccagcactttgggaggccgaggcgggcggatcatgaggtcaggagatcgagaccatcctggctaacacggtgaaaccctgtctctactaaaaatataaaaaattagccgggtttggtggcgggaacctgtagtcccagctactcgccaggctgaggcgggaaaatggcgtgaacccgggaggtggagcttgcagtgagccaagatcgcgccactgcactctagcctgggccacagagcgagactctctcaaaaaaaaaaaagaaactccgtaaaatatttaaagaggttaattctgagccaaacgtgagtgaccacggccctaggcacagccttttttttttttttttttttttttttttgagacagtctcgctctgtggcccagactggagctatctcggttcactgcaacctccacctctcgggttcaagagattaccctgcctcagcctcccgagtggctgggattacaggcgcccaccaccacgcccctggctaatttctgtatttttaatagagatggggttttaccatgttggccaggctggttttgaattcctgacctcaggtgatccagctgcctccgcctcccaaactgtttgggattacaggcgtgagccactgcgcctggccaatccccaccttcttgactgaccatttaaaaaatgtaagaaacacctttagctcatcatgagcagcacaaaacaggcagggacaggatttggccctgaggcaggagaataggtctggaggcagggaacataaggccaaatcaaatggaaacaattcagctatgacaggaaatatcttctccatttaaagagggcatacatccagtaaatgactttgtaactttacttcatcctcttcatttacataggacgtacattaagtaaccagtgaaaacctctagagggcatttaaaccccagaaaattcttaaacaggtctcttgagtccgtatgctccactggctcccaccctgcggagtgtactttcgttttcaataaatctctgcttttgttaagcttcattctttccttgctttgtttgtgcactttgtccaattctttgttcaagatgccaagaacctgcacaccttcaacagttaacagcccacaggcagtagtttgcgactctagtagagaatgcatagggatttccattgaaaatcattttttaagccagttacggtggttcacgcctatcatcatcccagcaccttgggaggccaaggcgggtggatctcttgaggtcaggagttcgagaccagcctggctaacatggcaaaacccctgtctagaccaaaaatacaaaattagttgggcgtggtggcccgtgcctgtaatcccagctgtttgggaggctgcgacacgagaatcgcttgaacccgggagggagaggttgcggtgagccgagatcgcgccaccgcactccagcctgggtgacagagcgagactccatttcaaaaaaagaaaaaaaataattgttccctacgggaacggtataattaggatataattgtttctggccacagatcacatcccttctggttaagtccaggagaatctggaaatacgtagggcaaccaggccagaaggcgttgtaactgcctaagattgaccaaccctaacgcgggaggcgggacgacggtcactgatttgccagcgtgacgccggtctgcgactggccagtgccgtcctgggcgtgtcggtaggacggggctgcgacggtttcccataggctggcacagaaaggggcggggaaacaagagtgcaacgttaccaatcggcatgcgggacgtaacgcaattcttttttccgattggtccgtgaagctcgggaggtcgttgggggctcgaccttgggatagaacgcctgccttttattggtcaatactcttcgggccgggcaatgtggctccccgaggctgcctgcgattggtgaacgcgtcgcggctcggggcggacctgcggactgaagatccttatgcgattggccggggagccggaggggcgggcaatttgggatcgacagtgactcgcgactggtcggcgcggcgaaagcagagcggcgcgccggttccttggttcctgagggcgatggcgcggggtggctggcgccggctacgccgcctgttatccgcggggcagcttctattccagggccgcgcgctgctcgtcactaacacgctgggctgcggcgcgctcatggcggccggtgatggcgtgcgccagtcctgggagatccgcgcccggcccggccaggttttcgacccacggcgctccggtgaggacgccacgctgcttagtccttcaccccgggcgacctttgatcccgacacccgactgcgggccgtgacccctgacccgtggcctcagtcccccgcaggacccttgccctgaccgcgcctctccccgggtgtctgtctccccgcagctctgggtctccatcacctcccaacccccggaggtctctgcccactacccaggagcctctggagccgcgcctcctggtggggcttgtagtggaagaatgcacgggtgggctcttccggttttcccggtgaggctgaggctccgggatggcattgggcttacccaggccttagccagggagggagagagggaatggactgaggaacttgccggcccgacccagccccctgacttacactcttatagcgagcatgtttgcggtgggctgcagcatgggtcccttcctgcactactggtacttgtcgctggaccgcctattccctgcgtctggcctccgaggcttcccaaatgtcctcaagaaggtcctcgtggatcagctggtagcctctccattgctgggcgtctggtacttcttgggtaaggagcctcctaagcctaggctttgcctctcataggtcgggaggggtggagccagctttgtgttaagaaggatgcagaggtgcatttccaatttgccccctgtttgggtcgccctggactaggagccaggtcacagcggggacaggacggactcggccgatgtgaacgctggcgagtgtaggagggacgaggactgtatctgttggggctgccctgggcgggaggttgagagcatttcccaaagaaggggaccacactcagttgagacatgaagagggaaccagcgggcagagggaacagctaatgcaaaggctctgaggcctgaaggaagagaaattgaggctagacttaatggggtgcaaccgtgccagccctaggctcggtaaagacagcggtattaatagaggagtctctcattctccacctcccagcccggcttcctggtctgtgatggaaaagtaacacaactccctcaacttcagggtgtctccattggggcacgtgtttatatgtttataacctctctttctctcactgggactgacttgctctgttttgtctctacaccagctaccctaattctctgtccatcccatctgaaagtccctgtccctctgcccggggtgggcggcgtgggctctcaggggcccaaccccgccccctccatcgtcagcccatcttgtcgtctcaacagtacttcctggcctctaacactctcatttcttggtttgcttcccaggccttggctgcctggagggtcagacagtgggtgagagctgccaggagctgcgggagaagttctgggaattctacaaggtgggagcacccgccccttgcacatgtccggccccgccccctgatggccgctccgcccccgcccagctctggccccgcccctcatcccccgcctctccccgcaggcagactggtgcgtgtggcctgctgcgcagttcgtgaacttcctcttcgtgcccccccaatttcgagtcacctacatcaacggcctgacgctgggctgggacacgtacctgtcctacttgaagtaccgggtgagtgtggagggcataccaggcacccaggggactccccagggggctacacgtgtgagctccaagtggcagtgtagccagccaccctggagggtgggagtctcctgtgctcctgacaacccacacccaacagtgggctggcggagagctcctcactagcagttaagacccagccgtggctgagcgccgtggctcatgcctgtaatcccagcactttgggaggccgaagcgggtggatcgcctgaaattggagttagagagcagactgggcaatatggtgaaaccccttctctactaaaaatacaaaaaattactggtacgcacctgtaattccagttacttgagaggctgaggcaggagaattgcttgaacccaggaggcagaggctgcagtgagccaagatcatgccactgcactccagcctaggtgacagagcgagactccgtttcaaaaaaaaaagacccatgccgggcgcggtggctcacgcctgtaatcccagcactttgggaggccgaggcaggcggatcacgaggtcaggagatcgagaccgtcctggctaacatggtgaaaccctgtctctactaaaaatacaaaaaaaaaattagccgggcgtggtggcgggcgcctgtagtctcagctactccggaagctgagaccggagaatggcctgaacccgggcagcgaagcttgcagtgagccgagatcgcgccactgcactccagcctgggcgacagttcgagactccgtctcaaacaaacaaaaagacccaacccttctctgctgtctgatgtgacctcagcccggtccctgccaagtctgttgagcagggctgacctctggcccaagggcaggtagagggacagggagggatgagccaggcttctgaccagatgccttgtcttgtgtggacagagcccagttcctctgacacccccaggctgtgtggccctggacacccgagcagactgaactgtctgcttcctggaccagatgcaagactgtctcctggcggaccaccccctctgacagaaggggaatgggctcctgcagcaagctcgggtcttgagccacgtcccagcaccacttcagctccggagcattgggctgagccgccctttccaagctcacttctgggactgagtttcctcaaccggaacacacccatgaagatggatgatcatcccctagcccttctcagcaggaacctcatgcgacctgtgaccaagatgtcccatcctcagcacagggcccactctgccaaccagtctcaagcaccagcccctcaacactgccatccacctggctctgggccaagccaccaatccagagctccctcaggtcctgggactaaggcggggacatgactgatcccctcagagcaggctcaggcctggagtcggcccccaaaagtttcacatagggccaggcagcctctgtgtttctttccctggtcctgaactgtggaaatgccattaaactctctctataatgtaactgaaactgctggctgggcgcagtggctcccacctgtaatctcagcccttcccgaggctgaggtggaaggattgctcgaggccaggtgttcgagaccagcctgggcaacatagcaagaccctgtctctatttatattgaaaaataaaaataacaaaagaaaatgctgtggatgatcaaaaccagggtgggcaggacccggtgctcacagggacacacatggatggtccattcgctttattgggtgcgtgtagtgttgtcatgacatctcctaaggaactggggggcacgtttgacactcatgaggtcagaacaggtctggtgggcggggggggggggggtcccagggtggtgaatacccacagcacacccccccaccaaaagagaaaacggggagaggagcctggcaggccagactctgatccccatggtccacacagggaaacccccaacagcggcctcggcccaccgcggcagagccgaggggctggcaggcctggccacctcccattgcccgatcagcctgctttagggtgtcatctggcccctcttcacaactgacaactgtggatgggggtgaattttaaaaaaaggcggggggggggggttcaggagggtgagcggtgagttcacggggccacgagacaccacagctgagtggggaaagggctatatgtacaggaggggcagggcttggggcgggcaggggagcctgggcccctgggggacatcttcaataaataaataaatagctacaataataaataagggtgacgggctaagtcaggagcaggggtcttgtgcccgtggctggtaggggccgggtcaggcccgggtagttgggggaaggtggggaagacagggaagaggggaaagggagtgggatggctctcagcaggcgcagtcctggtgcggtggcacctgctggtcactgagctgtgggccctgcttggcgcctgtgaccgcagggtccgccgtgtccaacgactcggacatcttctcgcagatgacatccaccaggcgctcaaaggtctgcttgacgttaatgttgtccttggcgcttgcctcaaagaactcgaaccctgtggtcagagaaggcagggatgaggaccctggccacgccctatgccaactcccagagatgcttctctgaggaaagggaacacctggagattcccagtgccaagcaacttattgaaggtactgacaaatcccacagagaagaaacttattgaaggtactgacaaatcccacagagaagcaacatggaactgggtcagctttgcatttcctgctttttttttttttttttttttttgagacagggccttgctctgctgcccaggatggagtatggtggcgtgatcatagctcactgcagtctcgacctcctgggctcaagtgatcctccacccccacctctcaaattgctgggattataggtgtgagccagcgcacctggcctcctgcccttccttcctaaaattgtgtctcgttgtccttagggacctggcaagacatgccctgcagcgtccagcccagccccgtgcactggccctggaaggctctgacactcaaatccagctgtgacctccccctgctcacacaccctctgtgactccctattgccctccaaagagtcccagcctctcagcacatggttgaggccctctgtgatcggccacatttcctccagctgaccctcatgttccagtcttgtgaaattattaccaaaacacacaggacctttctcactgcaagcctttgcccaagctatttcctctgcctgaaagacccttcttcactacccaccactccaggaagcctggctcctctcatgtgctcctcccatccaggtccctccctctacctcaggggtccctcgaggcacccctagatgcctcttgagcccagcaacacccaacaaagcgttggacggtgagtgtcagaataaatccttaaactttctgcatggcaaactcctacacatccctcaggatccaactcaaatggctcctggatgaaggctagtttgcagaaagtgtgaattacctggctttagctgtaagaccttgggtgtgtgccctcccctctcttagtgtcctttttctagacttgtgggtctccagcccagctgggcactcaccaaggtggtcagctagctgccggccacgttctgatgacaccacccgctcatcctccatgtcacacttgtttcctaccagcagcacctgggcattgtcccatgagtaggtcttgatctgggtggacctataggaggcaccaatgggggcaggtcagggcttggaggatcccagctccaccctgacgggctgatgtggagcctgtgtccttgtccgaggaagaaagacccagaagcttgcccctccatcctccccaccatcctttcccccaatgtgccccgctttcaccccactccagcccccgactgacccattattgtttctgtgttttggggttttttttgagatagagtctgggtctgttgcccaggctggagtatctgcctgccttcgcttctcaaagtactggaattacaggcatgagccacccagcccagaaattttctttttttgagatagagtcttgctctgtcgcccaggctggagtgcagtggcgcgatctaggctcactgcaatctccgcctcccaggttgaagtgattctcctgcctcagcctcctaagtagctgggactataggcatgagccaccatgcctggtaattttttgtgcttttagtagagacagggtttcactatgttggccacgatggactcgaactcctgagctcaagatctacccacctcggcctcccaaggtgctgggattataggcatgagccactgtgcccaacccagaaatttttttttaaagttattacttctgagcagaaaattgaaatgtttacaatctctaacctatgccaactctccttttttttttgagacagagttttgctcttgttgcccaggctggagtgcaatggcaatcttggctcactgcaacctccacctcccgggttcgagcgattctcctgcctcaggctcccaagtagctgggattacaggtgtgcgccaccacgtctggctaatttttgcattcttagtagagatggggtttctccatcttggtcaggctggtctcgaactcccgacctcaggtgatccacctgcctcagcctcccaaagtgctgggattataggtgtgagccaccgtgcccggccatgccaactctccttatagtctctatattctccaccctacacttgcagatatttgtttctatatggttatagttttacttttccatctgaaatccttctctgacccctacgttttatttattattttttgaagaaagtttggctcagagacaatggccccagaatgagtgtggaaggccagaagcgatggctcacgcctgtaatcccagcactttgggaggccaaggtgggcagatcacttgagccaaggagttcaagaccagcctgggcaacatgaggaaaccccatctcaactaaaaatacaaaaaaattagccaggtgtggtggtatatgcctgtagtcccagctacttgggaggctgaggcaggaggatcacttgagcccaggaggtcgaggctgcagtgagccctgatcgtgccactgcactccagcctgggtgacagaataaaaccctctctcaaagaaaagaaaagaaaaaaaaagagcaagtggggtacactcaccagtcctgcactgcattgaaggattcctcgttggtgatgtcatacatgaggatgaagcccatagcgccccggtagtatgcggtggtgatggtccggtaccgctcttgccctgctgtgtcctagggaggaagagatgaaggtcagagaggacctgcacataaggccctcgaagaggaaatgagctctgatatcatccagttcagccccctgggagaagcaggagcttgcccaggggcacaaagtgtcaggaagagcaggttgggtcaccagtgctcagaatatatgagtgctccattattccacagagtcattcaccaaacgtactgtgccaggtgctgtggctcacacctgtaatcccagcactatgggaggctgaggtgggcaggtggcttgaacccaggagttccagaccagcctgagcaacatagcaagaccccatctctacaaaaagtacaaaaattaacagggtgtggtggctcacacctgtagtcccaactactcaggaggctcaggtgagagggttgcttgagcccaggaggcagaggttgcagtgaggtgagatcgcgccactgcagttcagcctgggtgacagagtgaaaccctgtctcaaaaaacaaacagggggtcgggtgtggtggtggctcacgcctgtaatcccagcactttgggaggccaaggcaggtggatcacctgaggtcaggagttcgagaccagcctggccaacatggtgaaactctgtctctactaaaaatacaaaaattagctcggcgtggtggcatgcacctgtaatcccagctactcaggaggctgaggcaggagaatcgcttgaactcaggagacagaggttgcagtgagccgagatcgcgccattgcactccaccctgggtgacaagagcgagactccgtctcaaaacaataacaacaaaaaaaaaaaaaaaaagaaagaaagaaagaaagaaagaaagaaaacagaggccaggcgtggtggctcatgcttgtaatcccagcaccttgggaggccaagacaggtggatcacttgtggtcaggagttcaagactagcctggccaacatggcgaaaccctatctctactaaaaatacaaaaaaaaattagctgggcttggtggtgagcccctgtaatcccagctactcaggaggctgaggcaggagaatcgcttgaacccgggaggcagaggtttcagtgagccaagattgcactactgcactccagcctgggtgacagagcaaaaactctgtctcaaaaaacaaacaaacaaataaacaaacatggactgggcactgatcttttccacaccctgaactggacactggggacacagttgttaacaagatgggcacttcccttgctaagtgacactcagtgtgggaaatagaaaataacggtataaatgtatcctatattggagagtgacaaggaccaaggagaaaaatcaagccagatgaagatggagagaatttaactgtaggtttaaaaattaaaggaagctgacacttgcctgtactcccagctacttgggaagctgaggcgggaggattgcttgagcccacgagttcaaatccagcctgggcaacagagtgagactctgtctcttaaaactaacaaggccaggtggggtggctcatgcctgtaatcttagcactttgagaggctgaggtgggaggatcgcttgagcccaggagttcaagaccagcctgggcagacatagcccgaccctgtctctacaaaaaagaaaaaaatcagcaggcgtggtggtagaagcccgtggtcctagctactcaggaggctcaggtggaagaatggtttgagcctgggaagtcgaggctgcagagagccgtgatcacgtaactgcattccagcctaggggacagagcaagaccaccctgtctcaaaaaacaaacaaaaaaagagaatggggaccaagatccagctgaaacctcatacatggaagaacttgaagatggggaaactgagggaccaggattaggtgcttatgggagaacacaggtgctgtttctgccccggtacacagtgggcaccttactgataaatgcccagtgtgtaagtgaatgactccagtcaggaaagagatagacgaggttggggctgcttttccaagtacgggaatccaaccgagccgggcgggagccctccagctgggacccacccagatctgcagcttgatcctcttgtcgttgcgatagatggtcttgaccttgaagtcgatgcccacggtgctgacgaaggcaggcgtgaacgagtcgtcagcatagcggaagaggaaggacgtcttgcccacgctgctgttgccgatgatgagaatcttgaacatgtagtcgaagttctgatccgaggactccttctgcccatagcgcgagtctgtggcggatgccatctggggataccgggtgtagcagagccgtgaggggggctctctccatcctcatgtgcccaagcccaggcagaagatggcaagggctccagaaaacggccggtgtatggaggacacccttatcccatcaggagccccagtattaattggtggtgcccccagcagagggcagcctgtgaccttgaaatcctgggcgtttcagaggaggggctcagagggttgccgatggggacaccccagcagcccccttcaaggggcaggtgccccaggtggggctgtaaccctaaacccagggctgagcccggagggggtgactgcggctggctccgccccccatcaatctttcatggtcctcagaacccggccgcgcggccccacgtgcaccgcgtgcatggtccctcgaggacgcgcatctgcagcccccgctccccgcaaacctccaggccggagagctccggccaaggccgctgcatcacatgatacaggaggggcatgcacacgctcacgtgcacacagcctcaaacacgctcatccgtacatacaggagtgtgtgaacgcactgaggtgcacaggacaaagacacagacacctgtttgcacaccgactcgcctatagaaatgtgcaaaccacccgtgcgcacaggcccctccacccatgcaggcgtgtgcacatcacccacacggacacggatccccgtgcttgtatgcacgggccatacctgcacaggcggtccacacgtctttctccacgcgcgtgcaacgctcacacacttaggcccagacccccacggcgtcacacgagcatatccaggtacacaagcaagggtgcacacagacccgctgacacaggcaggcgcgcacacgcgtgtgcacaccacgcgcacgcgcacgcaaaagcctcccgcgcgcacagcttcccgcaaggagctcggctcccctccccctccgccgcagagcaggggggttgggggggttagtggtgaggatcaggcaggagtggggcgcccgggccctacccattcccagcctcgcgaccgccgcatccttccccccattcaaccctagtcaacctcgtcccccacctccatcagcccatcagtcaaatgaaggttatgcaggtgctcggagcctgagcacacccggccgcccaggagctcaccttgccctgcaccgatgcaacggcgaccctagcggcggtgacttttttggcggtggcggtgacaggaccccggtgcgttgatgtggggctgcgcggcggcggcggcagcagcggctcaggcccctgcagtcctccgtgacgtcctgcaaagggaggggcggagcctcacatgtagataagtccgtgacgccatccggaggcggagccgcgcgtagagatgtggcccattgacgcacgcagagccagatggggcagggctcctgagcagattgacgtgcaaatggggcggggcctagcgtgtgcatccagtaggggcgggagcggcgcgggggccgactccgcctctcgtccgcctcctgtccgcctcggggaggcggggcccctcagcgttctctcactggcttaagctctcgagcgacgggcgaagtagccaatcagagattgtctacgccctcctcttgtccaatggtggcatctgggagattgaagggccgagaggctgaggccttggctgagccccggtcttcgaggggcggttcccttacccgcccgcacccaccccaggtaggggactcttgaggccaccgtctagtccaaggtgctgtgacccctgttaaatgcccctgactcccaattgcagaaaagaaaaatcgaggcccaagagatgttttataccctcacatatatggggttcaaaataaataccaaagaataaacaggagtcaagagggacccctgtcccattcccgaggcgtaagacccccccactgagggaggggctagtaaagactccacccctcccccgtttctgaggtttgaaaagaaagaagtagaggtcaagagagcctcccctccccaccattcccagaaaaggaggaaggggctgatggactctctgggaaccccctcccctccctgcgccccgtcatcaagaagaaaattcgaagaaaaggtttagcagggacagagaagcgacctgtcccggaaaccccttaaagcctgcggtaaatgccccgggaaacagggagggcacgagccgaagcctccagctcttcaaagctcggattcaaagacccgggggctgggagaccccctccctccatcctgggaaagcaaaactcagaggatggagccttttgggagctaagatggtccatcttttattcctccaaatctttagggaaggaagtcagaatttggggagggaggaggagcccgaaaccccagcccccactttgggtctcctgctccccctactccagctttcaaaccctccaggggtgtgtggcccccaggagagtcctgatcccctagattctccccccacccctcccagtaggcggggctggagcgtgtgtgtgtggcggggggtgactcgtcctgtttataaaaagctcgccagctgcggaggcgccgagagaccagaataacttagcgcctcgaggcccagccgccgccaacccagtccccagcccgcccccagtgccctgggagtactgggacgcccacccccacgtccccgcaccgtttacatttgggaaatttattttttctttttagggtaacatgtttgctccctcctcccccactcggactatagaagtatcaccaatccactgcagagaaattgggaaaattcagaaaaacaaaaaataaaaagaaatccacctcccattctccctgccctccgcgcccacgcggtagtccgtgctctgtggggggctccagggcagctggtccaggccctggcctgccgcctccttggaggggaggtttttcggttgctcagctccctgatcgcccaaaggcacgcttcctacatgggtggctctctcggaaatacctcctgccttttttccccaggaagagaaaagtgagccacgagaatgtgcggaagcttccgtcactgacttagtattttaaagtaaaaatagccgggtgcggaggcttacgcctgtaatcccaccactttgggagaccaaggcgggaggatcgcttgagcccaggaattggaaaccagcctgagtaacatagggaggccccatctctacaaaaaatttaaaaattagctggatgtggtgtcgcgtgcttgtggacccaaatactcccgaggctgaagtaggaggatcacttgagctcaggaggtcgaggctgtaggaaaccgtatcgcgccactacactccagcctggacgacagagtgagacgctgtctcaaaaaattaattacttaatttaaatttaaaaagaatgcaagcccttgattgtccagagcagcattgggctctggaattagaaatggttgagctgggggaggggctgcgggattggggtattttctttgtgtcaggggagacagagctggtgggagaacgggctaggcttccaggccggtcccactcagaggaaagtccagaggcttccctgcatccctaccctatcgtctacactagacaaataaaaataaaaatgtggccaggtgcggtggtttatgcctgtaataccagcactttgggaggccgagtcaggaggatcactccttgaccttgaggtcaggagttcgagaccagcctggccaacatggtgaaaccccatctctgctaaaaatacaaaaattagcccggtgtggtggtgcctgtcccaggaggctgctcaggaggcccaggcatgagaatcgcatgaaccagggaggcggaggttgcagtgagctgagatcaccggcaccactgcacgccagcctaggtgctagagggagactctgtctcaagaaaaaaaaaaaaaagtatcccagatacgggtccagggacgacttctcggggaagaagacactaacttaaaacccagtgtgggggccaggtgtggtggctcatgcctgtaatcccagcactttgggaggccgaggtgggtggatcacctgaggtcagaagttcaagaccagcgtggtcaacatggtgaaaccccatttctactaaatattagccgggcatggtggcggtcgcctgtaatccctgctacttgggaggctgaggcaggagaatcgcttgaacccgggaggcagaggttgcagtgagccaagatcacgccattgtcctccagcctgggcaacaagagcgaaactttgtctaaaacaaaaataaaaacaaaaatctaatgggtgaggctgggggctgagagagaagcattccaggtagtgggaacagcttgtttgaaggccctgtggtgggaccaggcttgcagtgtggccagagcagatgcagtcagtaagaggagagggacaaatgcctttggctcaaactgaaggagaacatatgaatattcatttataagaaatatgaatattctagggctgggtgcagtggctcatgcctgtaatcccagcactttgggaggccgaggcaggcggatcatgaggtcaggagttcaagaccagcctggccaacatggtgaaaacccagtctctactaaaaatacaaaaattagctgggcatggtggtgggcacctgtaatcccagctactcaggagactgaggcaggagaatcgtttgaacccaggaggcggaggttgcagttagccaagatcacaccattgcactcccgcctgggcgacaaggcgagacgcaaagaaagaaagaaagagaaagggaaaaggaaagaaaagaaagacagagaaagaaagaaaagaaaagaaagaaaaaaatatgaattttttttttttttttgagacagtctcgctctgtcacccaggctagagtgcagtggctcgatcttggctcactgcaagctccgcctcccgggttcaggccattctcctgcctcagcctcccgagtagctgggactacaggcgcctgcaaccacgcccggctaattttttgtatttttagtagagacggggtttcactgttagccaggacggtctcgatctcctgacctcgtgatccgcccgcctcggcctcccaaagtgctgggattacaggcgtgagccaccgcgcccagccaaaaatatgaatatcttataacagatggagaaaaactagagggaaataagtcaaaatactgcagataatccatgggtggagatacagcagaattttatttccttctttatacatttccattatttccaaattttttacagcgaacatggtattactttgtaagcggactggggggaaaaatcttgaaaaaaaaattccctaaatatcttctttttaaaagtctggaaggaaatgcaccaagttcgtgaacccggatgacttttagttctggcactgtggaattttatcattaactgtgatgatgatgaattctgagtggttataatatttatgaacgaagccagctgctctggaagccgagggcggctgtgatgacgcctgtatcttgtataaatattcaggcacgcgaagagggaggcagaggggagggatggatactgaggcttccggaggcggggatcgaaccctaggcttgagcatggtgctgcccagtccgctcggaggcccgaccagcaggacgagctcttcccggcgaggtgcggtaagtgggaccatcagggctggaggatgccacccctccgacccaccccccaacccccgacaagcgcgccccgccgtgtctcccacgcccgccaccagggggtgccgctggctaacattgggcgcccagatgcttgactttgagctggcaagaggacctctctgcgcctcagtttcctcatcagtgaaatggccaggacactcaatttggtcaatcgaatgtcttaagatgtaaagattttatttaaccccagataaatgctcagtaccccaaatgtctaagatatttcagggaggtcacagacaacaaccccccacacctcgtcggagtttatccaagtactaggatcaggttacagaggggaaactgaggcccagaagaggctatgatggcaagaaagcctcaggggcctccctccctctagggggagtctgaggcagtttcaggaatcaggagacttagagacctgctagagagggaaaattgtgtgtttttgttgctgtcctagggaaggaggaacacgtaggggacccagtatggagttctgcggacagagaaagcagggggctcctacatccagagacaccaaagacagaaaataaagcgacttaaagcaacaactggtgcataggttcaatcagtcttcagagacatgccgggcacagagccccctctttttattgttgttgtcgttgcccaggctggagtgcagtggcgcgacctcggctcaccacaacctccacctcccgggttcaagcgattctcctgcctcagcctctcaagtagctgggattacaggcacctgccaccatgcctggctaattttttttttttctttttgagacggagtcttgctctgtcacccaggctggagtgcaatggcacgatctcggctcactgcaagccccgcctcccggattcaagcgattctcctgcctcagcctcccgagtagctgggattcaggcacccaacaccatgcccagctaatttgtgtatttttagtagagatggggtttcaccgtgttggccaggctggtcttgaactcctgacctcgtgatccacccgcctcggcctcccaaagttctgggattacaggtgtgagccgccgcacccagcctctaattttttgtatttttagtagagacagggtttcactatgttggccaggctgattttgaactcctgatctcaggcgatccacccccactcagcctcccaaagtgctaggattacaggcgtgagccacctggcccggcttttttttttttcttttcttttttgagacagtgtcttgctctgtcgcccaggctggagtgcagtggcatgatgtcggctcactgcaacctccacctcctgaattcaagtgattctcctgcctcagcctccccagtagctgggattacaggcacccgccaccatgcccagccaatttttgtatttttagtagagatggggtttcaccatgttggccaggctggtctcgaactcctaacctcaggtgatccacctgcctcagcctcccaaagtgctgggattataggcatgggccactgtgctcggcctcagagccccgtctctttcctttccttctcttttctttttatttttagacaggatcttgctgtgttgcccaggctggagtgcagtgatgcagtcatagctctcttcagcctccaactcctgggctcaagcgatcccctttgtctcaaccttctgagtagctgggattctcaggtgcacaccaccatgcctggctaattttttttttcagagatggtgggggtcttgctatgttgcccaggctggtctcaaactcctgagcttaagcagtcctcccacctcagcctcccaaagtaccgggattacaggcataagccactatgccttgcccagcccttcttttctgctcctcttcctgccccctaccgtagtttcagaaacaaaactgggtatgagtgaagctttggtgctgaaaattttccccactcacatttccatgctcttgcagagagccgcttggtagaggaagacagggagatgcctttgggatggtctcctgactccccaccctttgtgcagggctactacagaggcagaaagctggcacgaagtagatgagcaataaatatttgataaagaaggaaataattaagtgacagatgtgactcaagagtgaccactggagagggtggactagaggctccagcagacagcacctctcctcacagggatagaagcccaggagaaagacaccagggcatcgtaagaggctgccccttagagagctcttttaggcaagtctagggtcagagtggaccccagccaggtgcctccaattagaccctgggagccacctataactaagagcttgattgtctccctaaatgggtgggaaagtgaagcaggagccacatggagcctcttcctggaaagtctgcctgccaagagccaaagggctttaccatccattgcccctgcagttcacgcagggctggccctaagtcctctggttgtcgaggggtaagtccccagggtctgggccggcttcaggggacaggagttcagtgtcaggcaactccaaggcctctttggctaaagctgtctcttccccctcctcttcttcctcctcatcctcttcctctgcctcctccagagtcagttcaaactggaatctgtcaggcccgtcccgctcggggttggtgaggtctgagggacttcgggggatcttgctctggtaccactctcgattgtcctccagcgtgtccagcaggtcctgtgcatctgggtggaccaggtcagcccaagtctcccacagtgggtgagcaatgtagtcaatgaaacccacctgtggcggggggtggggcatgtcggcatttggtgagttacagtgaaccctagactcaatccagcctccagatctttagccaagttgttccctctgcctggaatgccgcttcccaacaactgctcatccttcaaaacccttttcaaataactcattctctagaatgcctcccttaacccttctggcctcctccaaccccaaccctaaccccacagggctgaatgtacgtgtcccccagactggaagcccctccagggtcccgcatgtcacctagaacagatgtttccaaaccccagaagtgcatgtccctctccctgaagcccagagagaatggatcccaggtctaactcggcccagacagcacccttcaggcacactccctggctagccagccagggccaaaccagggctcgtggggttggctcagcccctccttttacttcctcccagtgtctaccggttcagcccagtcccctgccaacctgggacttctccactgaggccgtatgcttgtcacacatgggactgatgtccaggcccgactcacgctcgcggtctccctgctggaagaactcggccatgatgcggtccgtccactggcggtacaggggcagcggcttggtggggttgctcagatcagcacagtgcaccaggttctgcaagacctacagagatcgaggcttgggagggcactggcggggcccagccacacctagacctggcacctccacagacaggcttggtgccatggacacattcatcttacaggtggggaaactgaggcctgagacctgaagaaatggttaaggcacaggcatgtgactcttgccatttcttcaagtttggcatccagtcggcacttcataaatgaagctaaatgagaattgcaaaaatggaggccctctccgatttttttttttttaatgagttagggtctcacgctgtgaccctggctggagtgcagtggcaagatcttggctcactgcaacctctgcctcccaggctcaaatgatcctcccagcccagcctcccgagtaactggaactataggcatgcgccaccatgcctggctaatttttgtatttttgtagagacggggtgttgcccaggctggtctcaaactcctgagctcaagcgatccacccatctcagcctctcaaagtgctgggattacaggtgtgagccactgagcccagctttttttttttttttttaagagacagggtctcactcagttgcccaggctggagtgcaatggtgcaatcacagctcactgcagcctctaactcctggcctcaagcaatcctcacaccttggcctcccaaagtgctgggattacaggcatgagccactgcgcccagccttcactctaaatgtgtaagaaacctggctaaaattgtttttgtttgtttgttttggcttgtttttttgagatggagtcttgctttgtcacccaggctggagtgcagtggggtgatttcggctcactgcaacctctacctcccaggttcaagcaattctctgcctcagcctcccgagtagctgagattacaggcgcccgccaccacacccagctaatttttgtatttttagtagagatggggtttcaccatcttggccagactggtcttgaactcctgacctcatgatctgcctgcctcggcctcccaaagtgctgggattataggcgtgagccactgcgcccggctgctaaagttgtttttaaagtaaaaccggccgggcgcggtggctcacgcctgtaatcccagcactttgggaggccgaggtgggcggatctcaatctcatggagattgagaccatggtgaaaccccgtctctactaaaaatacaaaaaaaattagctgggcgcggtgccgggcacctgtaatcccagctactcgggaggctgaggcaggagaatggcgtgaacctgggaggcagagcttgcactgagccaagatggcgccactgcactccagcctgggcgacagagtgagactccgtctcaataaataaataaatacataaataaataaataaagtaaaaccaaaatttaaaaaggaagccccagtgcccatccagctacacacctggattcggtcggaatagttgtccaggaggaggacaccgaggcttgtcaccttcttggtctccaccatggtcttgaggtcggccaggaggttcatgtgtttggacatgtctgtggccagcacctgggggcaggcaagggaaggtgacaggcgcgaggaccctgcccaccccaaccctcactcccaactcccagatgccactctggctcagactcagccctctgggcctcagcatactcatctgtgaaatggaaggatgcaactgcattcactgcaaactctgctcaaaagaggggctcagtcaggggccccttttgggaggtcatctgggttggccatgaattccacatgtgtgacagggtgtagtggggaggtgatcaaatctgtgcgcctgggacttgtcagacagagtctcccacagtgggtgggcattgtagtcaatgaaacccacctgtggggtgggtggggcggaaggcattcgttgagtcacagcaaaccctagaaccaatccagcctccagatctttagccacgttgttccctctgcctggaatgccgcttcccaactcctactcatccttcaaagcccttttcaaataacccaccctcaggctgggcgccgtggctcacgcctgtaatcccagcactttgggaggccgaggcaggtggatcacgaggtcaggagatcgagaccatcctggctaacatggtgaaaccccgtctctactaaaaatacaaaaagttagcctggcatggtggtgggcaccggtagtcccagctactcggaaggctgaggcaggagaatggcatgaacccaagaggcggagcttgcagggagccgagatcctgcaacagatctgggcgacagagcaagactccgtctcaaaaaaaaaaaaaaaataacccatcctctaggatgcctctgttgacccttctggcctcctccaaccccaactgtgaccccacagggctggttaggggctagggtgacttgtgcctgaggacagtggggaggatgagttctgtgcaaaggggctggaagagttgggtacatgggagggaactaaaagaggtggctgtggctggaagaagtgagctcaagagaaagggaggtgagattgaagagactgagggcctctggcagctggggtagattgtccagaggctatgggagccacaggggagtttgcagctcactgtggggagggatgtgacttcatacccctcaaacttccatgtagccaccatgtgccctggagggctatttctaggcacagatgtttaaaaaccagattaacccagccgggcgccgtggctcacacctgtaatcccaacactttgggaggcagaggtgggtggattaccagaggtcagaagttcaagaccagcatggccaacatggtgaaaccccgtctccactaaaaatacaaaaaattagccgggtgtggtggcaggcacctgtaatcccagctactcagaggctgaggcaggagaatcacttgaacccaggaggtggaggttgcagtgagccaggatcacaccattgcactccagcctgagtgacagagcaagactccatttcaaaaaaaaaaaaaaaaaaaacttaacccacccatgtggactcagcccagccaggagtgactcagatgtggttcaccggcttctctgagagtcagacaaaagtctcaaaacttctcctcaaatctctcatctgtcccaaatgctgtctccccaccctgtgggtacccaccactcaagaccccaactccacctcaccaaacgtttagttctttctcactccaagccttggctttctctaagccctcctcacgtggggttccctctgctgagaacacagccttcctcattctgcacaccctggcttcaatgttccctctccaagaagccctttctgacctctttggctggtctgggctccgaaagcaccttgaaccttcctcctcacagctctgcctgcaggtccctagtcaagggttagaatttcataacggccggaactgtctttgcacagatcaagcacacaataggtgctcaataaatgcttgttaagtgaatgaatgaggcatgagaccccaaaacttactgatgtgcccctacctaaaaaaaaaaaaaattcaaatggatagatgtgtataatttttttttttgagacagagtcttgctctgttgccaggctggaatgcagtgtgcgatctccgctcactgcaatctccgcctcccgggttcaaatgattctcctgactcagcctcccgagtagctgagactacaggtgcatgccaccacacccagctaatttttgtatttttagtagagacagggtttcaccatgttggccaggatggtcttgatctcttgacctcatgatccgcctgcctcggcctcccaaactgttgggactacaggcctgagccaccgtgcctggctgcttaatttttttcttttcttttttttttttttttgagacagagtctcactctgttgctgaggctagagtgccgtggtgcaatctccgctcactgccacctccacctcccgggttcaagcgattctcctgcctcagcctcccaagtatctgggatcacaggtgcccgccaccaggcccggctaatttttgtatttttagtaaaaacaggggtttcaccatgttgatcaagctggtctcgaactcttgacctcaagtgatccacccgcctcagcctcccaaagtgctgggattacaggcgtgagccaccacgcctggcccagatgtgcttaatttaaggcttagcaaaagttgcacctgacaccccagaaacggtttccacattgcctgggtacagccaggatctgctgggcccagcagagggcctggggtttgggcagtcactagcccctttttttttttttttgagatggagtctcactctgttgctgagactggagtgcagtggtgcgatctcagctcactagctcactagctcactacagcctccgcctcctgggttctagcaattctcctgcctcagtctcccaagtagctgggatgacaggtgcacaccaccacacccagctaatttttgtatttttagtagagacgaggtttcaccatgttggtcaggctggtctcgaactcctgacctcaggtgattcgcccgcctctgcttcccaaagtgttaggattacaggcatgagccaccgcccctggccccactgttccatttcacagatgaggaagctcagacagagtgaggacatgcctgggtctggatgaaccgccggccatgccaatatcaccccaccctgctgtctgcagatgagaaggatgccccgctcccctctgcccctcccgccccgcttactgccctggcctcaccatgtcaatgaccatcctgcgcagactcagtcgctgcttggcgctgaggttctggaagatatcgcagttctctgcctgcagcagcttgaagcccacagccaggtgatggttctccagcaccgaggcgtcgttgtacataagcgccagctctgagtctgtgagggtatgggactgagagccccaagatccacccgccccacccactctacccaaaagcagcttttggaaatccttagcaaactcctacccatgcgttgaaggcccaactctagcatgccctcctgtaagaaaccatccaggtccctggcgcttccctgactgcagggctagggttgtctgtgtttggctctgcctacccaagactgggaaggctcctcatggaccccctatggccagtgacagtgagtactcagtaatgttttttttttttctttttcttttttagagacagggtcttgctgtcacccaggctggagtgcagtggtgcaatcacggttccctgcagcctcaacctcctggcctcaagtgatcctcccatctcagcctcctgagtagttgggattacaggtgtgtgccaccacccttgactaatttttgttatttttttgagagacagggtctcactgtattgcccaggctggtctcgaactcctggcttcaagcaatcctcccacttcggcctcccacaatgttgggattacaggtgtgagccatggcacccagtctctggactctaggtccttttgagtgaggggcctccactctcacccccagcactccagggcttgtacacaaaaggtgcccaataattgcctgtcaactgagtttttcagattcctcataggatcctaaactttaagatcttggtggaactgtctgggcgcggtggctcgtgcctgtaatcccagcactttgggaggctgaggcagacagatcgcttgaggccaggagtttgagaccagcctgggtaacagagcgaaaccctgtctctacgaaaaatacaaaaattagccaggcatggtagtgtgtgcctgtaatcccagctactcgggaggctgaggctagacaatcgcttgaacctgggaggtagaggttgcagtgagccgaaatcgcgccactgcactccagcctgggtgacagagcaagacactgtctttaaaaataaataaataaaggtcttggtggaaccagatcagctctgccacagctcattattctgtcatttgttggcacctactgtgtacccagacctgctccaagaccctgaagggagggaaaactgtcatagtcatttcatagacagggagactgggctcagggcagatgggaaccccctgagatcacctggtggacagggtggaggcagggtccacctcttctcctgcacccacttcccactcctacttactggtgttaatcagaaactggttggagaccccaggatggtccacgtcgtggatggcgcttgcaaagagggcagccaggatttccaagtctgtgaacacagcctgagcaggcagagggcacaggcggtgaggggcgggttctctgggccctgcacccgcccacctgcctgcagtcatggcgcagtacctcgagggcgggcgtagccagcagcacatgcgtggactgggccacgtcggcggcatgtaggctgttgtggtaggccacattggcgtggtagtgaccttccagcatcagcaggtaggtggccagtgtgtctgctgggatctggaatgtcttcagcaggtcccgctcctggtccatcacagaccctggctcagggccttggccttggggctgcagcacacgctgttcctacccctctcttctgaactcctatctatgcctcaagcacctgctcctctgagatgccctctgtgctctcctgaactcctccactctgtgttatttggtggtccatccctgaccctacaggactgggggtgtctctgtccagctcttctctccagatttctctcctcttcagggccaggggccgggccagggctgaggcttctggacaacaaactgttcatctgagtgaactcctattcatccttcaataccctgctcaaattatccccttcagaaatgtcagggaggatttgaaaaatgagtgtccctgaggtctgtggtaggaagcagtgagggaaaccccaggagtttttccttggaagccaagggcagggtaggtacctgaaaaatgctgaatatgatagctgtgaggggccggttcccacttagctccgccaccttgaacacatcaagtccccacttgttggtgtcttctagctcctaagatatgaagggctgaagcttaattaaccccagcccaacttccccagactctagagcctccatcctcccaccccaggttccacagtgagccccaactgcccagtatataggtgggcaaacaggcccgagatagggcatccagacagagccagggaccaaaccttgatcttggcattgtggttggggacccaccttggccagttgctcctcctggtcagtctggaccccaaagcgtgggacagtggctgaggagaggctggcactgtggcagagcccatgtaggccactgatccgggacatgggctgtggggcctcctcagcggtcaccttgggcagctccacctcggtctgctggtctgcggatgggccagggtgaagctcagagaagccgatttcacctgctggggcctggcctcaggacctgaattttgccaaaccccagaatcaacctatttccctttctacaggaaccaaagtaagttcggagtaaagaccctgtcggccggacgcagtggctcacgcctgtaatcccagtgctttgggaggtcgaggtgggcagatcacttgaggtcaggagttcgagaccagtctgagcaatacggtgaaaccccatcgctactaaaaatacaaaaattagtcacgtatggtggcaggcacctgtaaccccagctactcaggaggctgaggtgggagaattgcttgaacccaggaggcggaggttgcagtggctgagattgcaccactgcactcccgcctaggcaacaaagtgaaactctgtatcaaaaaaaaaaaaaagatcctgtcttgcctgtagctacctacccctctcctctgttcacagctgatctcagtaaacccttctgctaggcttggcccctgggtgcctggggctcagcattttcccccaaacagcctaatgtcctttccgtctcccaagctagtgtctggttccctccatctcctcctaggcaaatttctactcatgcttcaaaaccgtagctttaatgtcccctgctcctggaagttccccttgttcctccctctgatccagccctgactcatgggggctgaaggtgtctgtgtctggctgtatctcccccagactgaggtctatcataggaatctttcttttgtttcttagtactcctaaaatgtcgtccaggcagtgactcaacaaagctcacccaggaaggtccgggagatgtactcggacacctggttcccggagcggctggtttcggacaggtgggtcaactcccggttcaggatccgcttgaactggggcggagagaaggtgaagaccgtgatgatggggcaccgtgggccgaggcaggtgagctcagcgatctgccccacctcaccttgttggaggccatctcccccaccgagtgccgggtctgcagcgtctccaactgatccaggcaccagtccagctcgtctagcgtctccaatgccagcttctgccccgtgtcctctgggagccgaggcagtcaggggcctgcccaacccccccgctcagggaccccacgcctctcgcgacttcgtctcttcatctggaccctgaaactgttcccacgggggccacccaggactcctggacccaagttccagatctgttccccgagtgcctgtgtgaccatgagatctctgggcctcagcctcctcatctgtaatatgagtgtggtggggtccatccccgagggcgttattgtttttgcaggggcggggctacaattagccccagtataaggggctcatggactggggaggtcactatggaaaggaagctcccagctgtcctcagcgggggagggaaggaacaggtactttacctgcaggagggagctgattgctggatgaagggtttccgacgggtccctgcctgcggtacagcagcctcaggcgtggctgctccgcccatctcgccccgcccccaagtccaccaggccccgcccctcaaacccacctggaggcgccggagccccagcctcaatttgcagcccgctttccgcccaccttgtctctgccggccccgcccccgccccgccccgccctctacctacttggctgctcctaggcattgctggcgggcaagggccgccacgttgctccgaacggtccgcagactggccaggacctgttgggaggaggtggtaggcggtgggaaggagaggccggatccggagggggtcagggcagggagggcgggggacacccacctgggcaaagggcgtcacaatcatgtcctctccatgtctgcgaggagacgggccatcagggagagctctctcccatcttccagctttttacccacaccatatgccctcaactgagggggtcctgctctcaggacttctcctccaggctccttcttagtccctggggtcccctcatgcgactctccctgagacccagcacagcccctccaaccattcactcactttatcggcatctcataaatggggaaactgagtcctaggggtacgtagatatttcccttttcattatgcctactaggaagctcaaatcaaagtatttcttcatttgctgctaattggccttaatggtttgtttgtttgtttgtttgtttgtttgttttctgaggcagactcttgctctttcgcccaggctggagtgcagtggtgccatctcggctcactacaacctccgcctcctgggttcaagcgattctcgtgcctcagcctcctgagtagctgggactacaggcgcgcgccaccacacctggctaatttttgtattttttagtagtgacagggtttcaccatgttggccaggctggtcctgaacacctgacctcaggtgatccgcccacctcggcctcccaaagtgttgagattacaggcgtgagccaccgtgcccggccgaccttaatgtttttggattaccacccctactccagcaaaaggccaagttctctacacacttgattgaatatatgagctgtctggcaaactcctacttaaacttcaaaaccttccttaaatggctatttgaaggagcttgctgaatagaggaacaaaggaaggagggagggtagaggcggtgtcatcccaccagccccagactcacaggtcgctggccacagaggagttccgagacatggccttgggcgagagttcatagtcgctatctgagcggtacaggaaggactcgcgccgctggctgtgcgggactggagcctgcataatccggcccaggccagggctggactgagggtccagggccctcctcccacacgagagcccattttccaggtcaaagctgaaaggagagacggcatggtcagagacgagggtcatgacaactgggtgccgggtcgtggccaccttgtctggtgcgtcctccctggggctgcttggcagtcaggcaagtgtggtttccagcttgttcacctgcccccagctacaccctcaggaaccctgcacccctcacactttggtctttgagtctacactggactccaggacctcagttccagatcttcctcaaagtggctatgtggccatggacaggtactgactttctctggacctcaatcaccctatttcttttattttttttctctctttcttttttttttttctttctcgttctttctctctctctctctctctctctctctctcgccctttcttttctttttttttttttttttttgacagggccccactttgtcacccaggctgcagtgcagtggtgtgatcctacctcactgcagcctcaatctcctaagctcaagccatcctccagcctcagcctcctgagtagctgagactacaggagcatgccccaacactcggctaattttaaaattttttgtagagaccaggtctcactattttgcccaggctggtcttgaactcctggcctcaaacaatcctcccagctccgcctcccaaagtgctgggattacaggagtgagccaccgcacccggcctccccatttcttttttttctgttttttggggtttttttgagacgaaatattgctctgttgcctgcactggagtgcagttatccatgctggagtgcagtgggggaacgatctcggctcactgcaacctccacctcccgggttcaagcaattttctcgcctcagcctcccaagtagctgggattacaggtgcgcaccaccacgcccggctaattttttttttttttttttgagacagagtttcactcttgttgcccaagctggagtgcaatggcacaatctcagctcaccgcaacctccgcctcccaggttcaagcaattctcctgcctcagcctcccaaggagctgggattacaggcgtgtgccaccacgcccagctaattttgtatttttagtagagacggggtttctccatgttggtcaggctggtcttgaactcccgacctcaggtgatccgcccgccttggcctcccaaagtgctgggattacaggcgtgagccaccgtgcccggccaaagttttgtatttttactagagacagggtttcaccgtgttggccaggctgctcttgaactcctgacctcgtgatctgcccgcctcggcctaccaaagtactgggattacaggcatgagccaccgcacccggcctctcctgtttctaacatgtgcgtgatgtagcccatccccgagagctctttgagggggttacaaccgaacatccaaagactgcgactggatgaccatattgcaaagggacaaactgagatctagctcacatggtggacacgtggactggaaacagcttcttgggctcttctacctggaggaggccggggttctgcctagctcctgcgtgcgccttagtctagagagaccccactcctagccaacttgctcacacccttggctacctgccacgcccccagcgttccaggctccaccctcagcccataaggctccgccccacggccgccgaccacgcccccagctagccgggtcctgccctaggctcccccactcctccacttcatcttcagcctgaacgttccgcctgttatcttccacctccgggtctttgcacaggccgtgctttctgcccggcccaccctcctccctctccacactacctgtcccgttctaccctcaaaccctgtctttccctctggctcctcctctttggggtcagaggtcagagaaagggcgtagggcaagaactggggcgctagagaaggcggtgacctgggggtgggttttcaagaagggcaggcggaagcggcaccgacaggaagacaaccgggaccgcctgagactcggagctcccggccgagggccagtgtccggctggtcccggccaagacttttgggtcaaaggtcaccgtatccccgtccacgagctgggtcggcaccccgcgtaggctcagatctgggtagaggtgggggatttggcagcattcggtccaagtatgaccgggtctgagttgggtctgatcacgtcgaattggacttggtcacgaagagtttgttcgatgagttcgggagaattcggctacgtccgattgagctcgggagacttcggataagttcgagcttgttcgcctaagtccggttacgctcggtctgcttcgaacaagtccgggtgacgctcgggccgggtcgggcatgttcggtcacgtccggctacatgagggctagttcgggcatctccgactaagaccggccgcgctcggcctgttccgtccgactccagcgggtttagcagcaccgggatgaaccccacggccagccgaaggggcggggcttcttaacccttccctggcccgtctggggtgcgccgtgggcgctgtggtgcaatgggagacgctcttaggggcggactggaggcggcggataacccagatctgcccctcgagggggaggcatgcggatcgcgaccccctacccctctctcggctctccccaagggttccagaaaagcgcgtctgtggacaaatagggaaactgaggccaggagcggccacagggcgtgcaaatccggatcccgggcgcggagggttaaggactgggcccgggttttcttggggcgggggaggctgtttttctttctgctctaaacttagccgggagcggcggggtcaggctgtggttccatgacgcgggcggtgcgggggtagagccccccggctgtgggaacggcgcggctgcccattggccaggggggtaaactgagccagggaggctcggacttgggttcgggtctggcctgcgcggggccggccctcgttcatcctcacttctgagtacccgcgacgcgccctcgacgtccctgcgctgtctctagcgccttcaaaagggaatgtgcttcgctagtgtttggtgccccgaggtcgctctccaggacacggaacccccactctcccactccctggttgaaatggaaccaccaggaaccacggtcataccttctccctccaaccccagctatgaccttggagagggacctcccctctcagcctttgggtgccagacttaccaagtgggtgccaattcggcgcggaccaagcgcaggatgccagccacagtcggcgcccacaagccccactccgaaccccagccttgcccccatccctccccacgaggtcacagtcgtttctggaaaggcagggattcgaacccagaggggtggaccgagtgcttagaggatgcagcgcaagcagctgccgggcgcaggcgcgcgctcagcctgggactcccgaacgccctgcctcgaaaaccccctcaattcaggtcttcctccgtggacacccagagttcattgtgaggcccccagggcatctctttgctggcactgggacaggatgctggtgggagggggcaccaagggaaggagtgccccttccccctcctcccactgccaggacgcacagcctgcctgccccaggccggcgagggtcaggaggagacgtgagcctcagcccgtcccactctgggcctcacagctggaaggagacagacggctggtcccctgggcctatatccaggcggcgggtggagacagacggagacagagagagacagagtcaccaactgcgagacaaaagtagggtaaggtagggtagagggagagagatacagagaaagcgagggagaggcagagcgtccaagcccggactccggccccggccccagctgtccctggccttgtccctgtccctgcccttcccacctccacaccgggcgtcccggtgaccccgccaggccctctgtccagcctcaccacagcggatgggccaccgtgaagcgccgctgcaggcggatgctctgattcaccaaaagcttcctgaagagcccgggggagccgcgcggggatccccgaggggagccgggcccggggaccggggcgggcgcgggggggccctgcatcgccaggactgcgtggaggctggaccgagcgccggctgcgcgggaccttttctggacagctgcgggggcggggcccagcggggagggggcaaagggcgcatcggccccgcctcgaggccggcggctccctgacgacccccgggacaaacggggaaactgaggcacagagtcagacgcaactctctgctccttttttttttttttttttttgagacgatctcgctgtgttgcccaggctggagtgcagtggcacagtcctagctcattgcagcctcaacttcctgggctcaagggatcctcctacctcagcctcccaagtagctgggactacagatgcacaccaccacgcccgggctaatgtattttctggagagatgggggtgtctctttatgttgcccaggctgatctcgaactcccagactcaagtgatcctcctgcctcagcctcgcaaagtgctgggattataggtgtgagccattgcgccaggcccaactgtacttctttagagggctgcccctaagatctcagagcctggatcttactcagccttcctcggcacgtccctggttagtgcagcttgctgggccaataactgctaaaaagtgtagaatgagggagtcagaaagcaaggtgcccagagaaacagctgtcttgccttccattattgagggcatcaccgaggtatagagtttgccaatgtccgatcccacgcaatgtttctaatcctcctctgcccattttccagatggagaaactgaggcctagtgccatcaaacagcgcaccagaaactacaaacccttaatcctttgccaagtggggaaactgaggcttccatggacgcggtcacgggcatgggtctttgttgcagaaagcgagacccaaactcagggccccctctcccagcacccctccacgcaactccccacgtgatcccccacctgctctgacattccccaggccctgtctctggatgccttcacctctcctgctgtctcctcctagacaaacatccgcacatcacctctgccaagtcttctgtcctgcgaaacctcagccgcccacccctgccatcagagggacctcactgtcccaggactggggggggcctctggtgtctgggaggattcccagagtctgtaccaggtgctctaccctcagaatgctggagtcaggctggccttgttccactttacagaaaaggaaaccaaggcttagcatgtgtcacacaaggaggagggacctagaaacagccatgtcacaggcagaggcccaggggacctcccagcaactgaggcctgaccgtgccccttgctgtggaatgacctctgtctctcagcctgggccttccccccggggcggctgcctcagtcttggtgtccccagacatggtacccatgtttctggcagtcctggagaagcccattgatcagggatcccacaggagatcctgaggcaaccatgctaaggccagatacatgagagtctccccattctacagatgagaaaacagaggctcagaggaggagtcacacagcccagaaaaacagagagcctcaggtatctggccaggaagcccccctaacccccgcagtcttgcaaccagacacctggcgggaaccagacctcgctgtccccaagacaaaaataccatcgttgtctgctggggccagacctaattatagccatccctaggggacacatgctgctaggattggccttgtggggacactggagccaaggtctcagcagtcttgacaccacctccccgccactgtgagagaagtgacaatagttacatgtccccaaggagaaaccgaggcacagagattcagcccctcccccaaaatcacagacataaaataggaggctaagactaaacaaaattatgtaaactgagtgcttcaaaaacatgcagcactcagccaacagcagtgaagggaaaagtcattggattttcagacgaaacctacaaagtgtggactactattcccatttcgaggatggggctactgaggcacagaaaggcacagtcatttgcctaaggacacacagccataaggtgcaagactggggtcatttgaacccggacaggtagtgttcttcccagcctgggtcctcccgcactggatgcgttaactcatttcatcccctctgtagtcccaggggcgagtctcacattaatattttatcaataggtttactattaatgtttcatccatatatttaattttaaatattttattaacagttctaacaggaaggtgttaattaatagctgttcggatggagaaagagtcacagcaaggggtggccacagagccaggactcagcattcacagcctggctcctaccaggccctgggaggctctccaagccccgctgggtaagggacaaaagctgaaagaggtttggacagaagcacccctaccctgactccatccctgcattactgcatctcctgtagaggtgcccagtagtctctggtgcctttatttattttattttattttatttacatattattattattttttgagaacagagttttgctcctgttgcccaggctggagtgcaatggcacaatctcggctcactgaaacctccgcttcctgggttcaagcaattctcctgcctcagcctcccaagtagctgggattacaggcatgtgccaccatgccaagctaatttttttttttttttttttttgtatttagtagagacgaggtttcactatattggtcaggctggtctcgaactcctgacttcaggtgatcacctgcctcagcctcccaaagtgctgggattacaggcgtgagccactgtccctggccttacttttttgagacacagtttcactctgtcgcccagggtggagtgcagtggcgcaatcttggctcactgcaacctctgcctcctgggttcaagtgattctcctgcctcaacctcccaagtagctgggattacaggcatctgccaccacgcccaactaattttggtatttttagtagagacggggtttcaccatgttggccaggctggtcttgaactcctgacctcaggtgatccgtctgcctcagtctcccaaagtactgggattacaggtgtgagccactgcgcccattctgatgcctttagcacagcactgcctcagtttccctcatttgaatgttcccttctctgggcaggcacttttctccactgccaccaggtggccccagagagatttttttaaatgggtgtttttgaccattttacagatgagtaaactgagacgtggagaggggagatgacttgcccaagtccccacggaggagtcaagcagaatgagcagggtgggggccaggtcacatgtgtagatgttcgcatgggtcaaatcacacactcctttgctgcagaccctcccatggccccccattgccctcagatctgaattcacacctcccagaggtcccatgtggcccatccccacctcacttctcttggcttacactgttccagtctctccccactcctcactgttctctgaatcagccaggcttatttccaccccatggccctcacctgaatgcttgtcgcctgctgatgctttgtcttttgggttacagttagagtcacctcctccgagaagccctccctgactagccaggtaaatgcctcagagcaccctccagccatggatacaacttcacatttattgtcatgattatttgcctgtgagtccctggagagcaaggccaggtctgccatgttccctgctgttccctcagtacttggcacttagtagatgctcaataaatgcttgtagcggctgggtgtggtggctcatgcctgcaatcccagcactctgggaggccacggtatgtggatcacttgaggtcaagagtttgagaccagtctggccaacatggcaaaactgtctctactaaaaatacaaatattagccaggcatggtggtgggcacctgtaatcccagctactggggaggctgaggtaggggaatcgcttgaacccaggaggcagaggttgcagtgagacaagattgtgccactgcacccggcctgggcaacagagtgagagactccatctaaaaaataataaataaataaatgcttgtagcataaacagagagcctctccttccatcctcaagccacactgatccattttcagctcctcacatgcctgatcctcttgagtctgaggctttgcacattctgttccttctacttagaatacccttcttgcactcaccctagctgacctctttcctcctgcaggctaagcttaaatgtcacttctcccaagcagtcctccctgactcccaccccactgctgggtctggagcctcctctgggcttgttctctgacctttccctatcaacctgtgccttctccacctggtatgagtgtctccaccatcagccttaggggacacagcttcttatccatggttgcgtctccaacacagggcctgccacccagtaggtgcttaaatgccttctcaacaaaatgcttagaccctcccatacccctgtgatccatctggggctgtggggaagcacattcccccaacagtttctagggctgagtaaagagccacaagctggggacccagtgtgtaccaggctcaggcacagaatattcacctctctgatgaggacgccgaggctccgggaggcaccacggcttgctcaataccacacagcaggttggccttggggcctggccttgaactcagtttcgctgggcttccccctggggtgaacccctaccctcatatcagcacagagaagcacagtgggccacatgcatgctcatccacgtatgtgtgactgcagcgcatacgatgcgcagaacgacgtgtgtgtgcacacacacgtgcacagggacacccaatccaccgctcctgcctcccagagccaagcgggggcttcccctagaagagctcataccaaggctctgtttgttctttcttgaaaatggaaaatcatgagtcaccagaagggatggggaaggaggaactagaagccggggcgggagaaggggctcctgggtcacctgagaacagctccaacccctctgggctgtgggaaccatctaccccagatgcctcccaggctgctggagggccaggctgggggcgagaggccaggcttgctgatggagtcagaagccagtggcccctagggggtccatgcaccaggacgcaagaaagccaagctccagagcagggaagtaacccatccaaggccactcagcctggactgaaatctgggatgctggtccagctgacttggttctccctccaacctaaggagggcttggagttcctggaccctccttcctggccctggagcctccacctggtagttggagaccctcatgtagggccccctgaggattctacattatctttctatgagtctcttctgtctctgtcctaaccccaccccactcaacttacacgaaacaggagaagcagcccctccttacttaagtgaaagaaacttcctgtgcacgagcttcccaagggacttcccttcctcctacaggggagcagggtggggtgagggagtgggggcgggggaggtagcaagagaagactcctccccccaacactggaggcagcctgccctggcccttatatatctataatatattaaataggccaggtgctgtggctcacacatgtaatcctagtactttgagagactaaggcgggaggattacttgaggccaagagttcaagaccagcctgggtaacatggcaaaaccccgtctctagcaaaaatacaaaaattagccaggccttgtgatatgcccctgtagtcccagctactcgagactgaggtgggaggatcgcttgagcctgggaggcagaggatgcagtgagccatgatcgagacactgcacttgtacctgggcaacagaatgagactctgtctcaaaaataaaaacgtgtgtgtgtgtgtgtgtgtgtgtgtgtgtgtgtgcgtgtgtgtgtgtatttatatccaagcaccccagggttacctcgggtgcttgagctggtcacaaacttcccccacaggcctgcggacattccacaaccccgaaaaccttcggacccccagctatgttagcacaaggacagtcacactcagccacatacctacaggcaccacaaggggagacacacaggcacacccacaactacctgggacacatggaatcatacccaagcatgaacgtacaggagcaccccaaacacatctggtcaccccagtctcacgcgcgcgcgcgcacacacacacacactctttcagtcccaaccgcacgtgggcacacccggtcacacagacccacaagccatgatgacaccagcaccctcagctccacccctacgtagaaatagctttttccttccaggcgccagcctcaaccaagcagcagagacccccgccccctggagaagcaaggaccctcccccactcccgccaggccccgcgcgcccctcccccgcgctgcaggaggcccctgccccggccacctaccgcctgcaggaggaaacgggccaggagagccgcgacttcctgagctccggccgcgggctcaggtccctctcgcggcagcccgcggacttgtccggatccgaatagaagcgctgttggatgcggatggggcgccggggttgccgccacaggtgcttcggggctctggtcatgctgtggcggccgcgagagcgactcaacctgctgcaagcctctgccccttcgccgacccccaggttctccatgcgccagagaaaggggtctgggatagcagggagcaggactcgtccccgtgagcgggcgccgaggagcgtctgctcccgggtccggcccagggccgggagtggaggcgacagcgaggagctgtccgcgccggaggtgctgaagcggtagaaggtggaactggggctcaaggtggggccgacaccgaggagctgtcgatgcccagatggtgctgaagggtagaacaggggagaagaacgtggtgagggggtgttgaagctaggggctgaagagacccccccccaacacaccagccccgaaaaccgtctgccgtcccctatagcgctgcatggaaaagaaccaagacaaggacttggagtggagaagacagaaattgtccactgatcgctgctaaatggagggcagggagacagggtctcaggagacccccggggccgagacggtgtccctcgcaccgtgttgaaagagaaaaaggtagctttgggttctccgggtggatgagacagcgaagagctgtccgcgacctgatggtgctgaaggcaggggagggagaccggggttcaggtgcacccccagaccagggcgtcatccgcccaggaggtgctgaaacatgagcagtgacgggccctcaaccttccccagcaacaatggcaacaaggagtctggaagcagtcaaggttctggtcttcggaggtacgtacagatagcagtctttctgccaagcccaggaaggtaggctccgcggttcagccccagaaggggtctctttggagccctaaaacccccacccatgccaggcagggatatgagaaggacagggaaattggcaaggctgtgagggggctcccatgtctgggatgggcacacagaggctacctctggccagagctccaaacagctaccagtagggatgggcaaagaggggaagtcaggtctctctaagaaacatcctagttctgcttctaagaccctccccaccccaaagccatgctgcagctgagttgggggaggactggcagaaaacccaccttttgtggaagctcaggacaggcaggaggagtatctctgagactctcgtgcttttaaagccacaccaacacacagaccctcagcggaaatggcaggatctcattcgccctgagaaaggcccaggccccacctcacagccacgattcctgccctcaaaccccaggcctgcccctccctcccagttctggaaactcaagtctccacccaccaggcgtcttagtctcaggggtaatttcctgggaagtgcaaggatgggtaagaacattttccatcatggttaactgaagtaggcatgaacagcagcagggctgggcgggtgagtgtggtgcagaaagaggtgagattttgtactcccagggtcatgacttggtggaggcctcctgtgggctctgggcttgggcagggaggcatttaaggccattagggtgcctcttgctgcatcagatttgagaagagccccgatgtttttggaagtctcagaagcactcaacaaggtctttcccatggagaccatctcccagtgaccccagccatgtccccaggttggagaaaaggaaaacatttgggccaggatgtcagacagactgaattcaagccccagtaccatcatgtcttgctgtgtgacgcatgacaaatgactccctctctgttctatgcttgggtggttcagtccctgttctccacccccccaccactcccaagaactgactgtgggagacaacttggctcaatggtgagggacatggtcactggctggctctgtcacttcccctcccaaagtctttttttaaaatattctggaaaagaggaataataatggtgtctccaactcttggcatcattgcaaggactaaaagtgatgccagatgtaaagggtctgagaccaggagctgtgcataccagtgccccctctccccagctcctgctagcatccaccaacaactggtgtgtctagtttgtttgtttgtttgagacggagtctcactgtgttacccaggctggagtgtaatggtgcgatcttggctcactgcgacctctgcctcccaggttcaagtgattatcctgcctcagtctcccaagtagctgggattacaagcacccgccaccacacccagctaatttttgtatttttagtagagacgcagtttcaccatgttgtccaggctggactcgatctcctgacctcaggtgatccacccgtcttggcctccaaaagtgctgggattacaggcgtgagccaccatgcccagccctggtgttgtgtctactttgtaaatgtcatccaaagctcctcacttctctccagcccatggctcccaccctggtccaagcaccagtatctcctgcccagacactgcccaagcctccttcctagtctccttggtctccttccactcctatccctgacagtcagtgctccacaacagcaaccacagggaattttttaatgccaatattgaccaactctctctccggaagacacacctctcactctccagggcaccccatgaggtctggtgtgtggtttcagctcctgcctacttcccggggctcccctcccaccctccagccacactgatctgttttcagctcctgacacacctgatcctcttgagtctgaggctttatacattctgttccttctgcttggaatgcccttccccgcactcccactggttgacttctcttcatccctcaggctaaggatttgttttactgttttttgtttgtttgtttgttttgttttgtttttagatggagtcgcccaggctggagtgcagtggtgtgatctcagctcactgcaagctctgcctcccgggttcacgccattctcctgcctcagcctcctgagtagctgggactacaggcacccgccactacgcctggctaatttttttgtatttttagtagagacggagtttcaccatgttagccaggatggtctcgatctcctgacctcgtgatccacccaccttggcctcccaaagtgctgggattacaggagtgagccactgcacccggcctgtttttatttttttaagatggtgtcttgctctgtcacccaggttggagtgcagtggtgcaacctcggctcactgcaacctccacctcccaggttcaaacaattctgctcctgagtagctgggactacaggtgcaccccacaactaatttttgtatttttactagagacagggtttcaccatgttgaccaggctggtctcgaactcccgatctcaagtgatggaccggcctcagcctcccaaagtgctgggattacaggcatcagccaccacaaccaggccctcaggttaagtttaaatgccacttcttccaggtagtcctccctgagccccctcgatgtgaggtcaggagcctcctctgggctcctctgttcttctccatcacagcatgattactttgtcctgtctctgcctggtatgatctgtctccaccatcagcctgtgggcacctccttgtgcatggctgtgtgcccactgtgtgccaagtacagggcctggcacacagtgggtgctaacttaataaatgctttctggataaggtcaagaagggttcagatggacgaactgctcttcctctcctggggccggcccctttaatccccatcagccttctcacctatctgggaccacgctgtcttttctctgtcccttaagcctcaatggtgaacaccacatgggtactgggctcgacctctccaggcaacacaaggcggctcggcagcgatggcagcaatggggtacccgagaagcctctccggatgataccaccaccaagggggctcacaggggccaagccagaatccaccaactcccagaaccactggaagaaaccagaaagacatgagcaagttcttggtcatgggacctctctaggaccctgaagtgccctcacccagacacctggactggcccagagagctgtatctcagtcctactctcctgagtgaatttacctctctgagcctcagtttcctcatctgtgaagtagggatctcaaacgtggggggatataaatagtgcctggtccaggccaggcgctgtggctcgtgcctgtaatcccagcactttgggaggccaaggcgggaggatcacctgaggtcgggagtttgagaccagcctgaccaacatggagaaaccccacctctactaaaaatacaacattagccaggcgtggtggtgcatgcctgtaattccagctactcgggaggctgaagcagaagaatcgcttgaacctgggaggcggaggttgcagtgagccgagattatgccattgcactccagcctgggcaacaagagtgaaattccatctcaaaaataaaaaatataaataaataaatagtgcctggtccagccaggcccagtggctcacgcctgtaatcccagcactttgggaggctgaggcaggcggatcacgaggtcaggagatcaataccatcctggctaacatggtgagaccctgtctcgactaaaaatacaaaaaaattagccgggcgtggtggcgggcgcctgtagtcccaactactcaagaggctgaggcaggagaatagtgtgaacccgggaggtggagcttgcagtgagctgagatcgggccactgcactccagcctgagtgacagagcgagactccatctcaaaaaaaaaaaaaaaaaaaaagtgcctggtccacagtacacattgcagaaatatttatttattaactaataatagcatgctcagtagggcacggtggctcatgcccataatcccaacactttgaaagggtggtttgaccccaggagttctagaccagcctgagtaaaatagtgagacactagctctacaaaaaataaacaaaattagccaggcatcgtggtgtatgcctgtaaccccagctactcaggaggctgaggtgggaggactgcttcagcccagaaggtcaaggctgtagtgagccaagatcatgccactgtactttagcttgggtgacagagtgagaccccctgtatctctctctctctcttttttttttttttcgagatggagtctcgctctttcaaccacatcggagtgcagtggcacaatctcgccttactgcaacttccatctcccaggttcaagtgattctcctgcctcagcctcctgagtagctgggattacaggtgcccaccaccacgcctggctaattttttggtatttttagtagagaggggttttcaccacgttggccaggctggtctcgaactcctgacctcaagtgatctgcccaccttggcctcccaaagtgtgggaattacaggtgtgagccactgcgcccggccgagaccctgtctctaaaaataaaaataaataaaacagtatgtttatttttataacatattatatgctatataatgctatttattataatgctatgcaccatagtgatattctattgtatattttttcttacatttgagattccaatatattatttattaaaatataaaagtagggcccagcacaatggctcatgcctgtaatcccaatactttgggaggccaaggcaggtggatcacaaggtcaggaattcgacaccagcctggccaacatagggaaaccccatctctactaaaaatacgaaaattagccaggtgtggtggcacacgcctgtagtcccagctactcaggaggctgaggcaggagaatcacttgaacccgggaggcggaggctgcagtgagtggagaccacaccactgcactccagcctgggtgacagagcaagaccctgtctcaaaaaaaaaaaaaaagtaaaacaataaaacatgcagtaaataagcaaatgaataataacgatagtactaatggctaacattttctgcacaatcaccctgtataaatgccgttccaatagtacatggatgggctcatgaaggtataatgaagccatttagcaccattatttccatttaacaaaggaggaaatgaaggctcagaggttaagtaactagagcccaaggttgcaattcataaataaaagcaattctgagcttcagtgccgagttccttgaaggaaggactgaatgggagaaactaaatgagatgctgtttccaagcaggctctgggtaaatgctggatacattttaagaacaggcagaatcagtctgaacggatgcgttgggagtgtgagctcttcagcgcaacagatctgggttcaatccaggccacgtggtccagggcaagcggcctcagtttgcccatctgggaaatggaggcgaaaggggtacggatccctcagaggtgttgatgataaaacaatgggacccacgtgcgccagacacaggctgtgtgctgtccgcggtgctgaccccagaatggggcacaaaactggaactcacagctttggggtaaggcgatcagtgaagacaaatgtggagatgggagaggtggggttcaaagagatggcccagtcttcccctactgtcctcctgagcctcaccaatgagcctatctccaccaccagactgagcattaaaactgggaaactggccaggcgcggtggctcacgcctgtaatcccagcactttgggaggctgaggcaggcggatcgcttagggtcaggagtttgagaccagcctgaccaacatggcaaaaccctgtctctactaaaaatacaaaaattagccgagcatggcgctttgcacctgtaatcccagctacttgggacgctgaggaagcagaattgcttgaacccagggggtagaggttgcagtggaaagatctgggcaacagatctgggcaacagcactcaggctggagtgcaatggtgtggtctctgctcactgcaacctctgcctcctgggttcaagtgattctcctgcctcagcctcccgagtagctgggactacagacacatagtccccatctcaaaaaataaaaaagtaaaaataaaaataaaaaagctgggaaactgccaggcatggtggctcatgtctgtagtcccagcactttgggaggttgaggccaaaagtgagttcaaaaccagcctgggcaccccgtcgctacaaaacattttataaattagccaggtgtggtggtacatgtgcctgtagtttcagctcccaaggaggctgaggcaggaggattgtttgagcccaggaggttgagactgcagtgagctatgattgtgccactgctcttcagcccggcttacagagggaaactctgtcaaaaaaaaaaaaaaaaacggggctgggcacggtggctcatgcctataatcccagcactttgggaagccgaggtggatggatcacaagatcaagagatcgagaccagcccggccaacatgctgaaaccccatctgtactgaaaatacaaaaaagttagctgtgcctggtggtgcgcacctgtagtcccagctactcagcaggctgaggcaggagaatcgcttgaacctgggaggcagaggttgcagtgagccgagatcatgccactgcactccagcctggcaacagagcgagactacgtctcaaaaaaaaatggggaaactgaggtccaagaccatgctgctaatcaggaccagagccagggcaaagtggggtgggaggaagagggtgcggagaacggatgtgagttgaacttgaacttctgtgtgtgtaagggatgcaacatagctcatttccttgcctatgagtggagggccctctgactcgtgttgtggaggaagacatcaaagcttggagagaaaatgacctgcttgctgggagtcacacagctgggggcttgagccacgctcagatctcatccttctaggactgttccccgcatttgagcacaacttgtccccaccctttcccaggggcacctgaaatttaaggcagaaatgcaagtgctctacaagaggcctccctcgggagagttcctggtagctgggagggtgtgtcgggaatgaagagggtggggtgtgtggggacagttagcatctcccagatgggaggcccctgagatgtcagctgctcattttcttttttcttttctttctttcttttttcttctcttgtttttttttttttttttttttttttttttgagatggagtctcgctctgtcgcccaggctggagtgcagtggcgcgatctcggctcactgcaagctccgcctcctagtttcacaccattctccggcctcagcttcccaagtagccgggattacaggcacccgccaccatgcccggctaatttttttgtatttttagtagagacggggtctcaccgtgttagctgggatggtctcgatctcctgacctcatgatctgcccgcctcggcctcccaaagtgctgggattacaggcgtgagccaccgcgcccggccaagacagggtctttctctgtcacccaggctggagcgtgcagtggtgcagtcttaactcactgcagcctcgacctcctaagctcaaggatcctcccaccacagcctcccaggtagctgagactacagtcacacaccacaactcccagctaatttttgtattttttgtagagacaggatctcactatgctgcccaggctggtcttgaaatcctgggctcaagcgatccacaaacctcagcctcccaaagtgctgggattccaggcttgagccatggcgctgggcttgtctgcccattttcctgctgggaaaacaaggttccagatgggagaactccctgcacacattcctatttgttcacgtattcattgaacaaatgcaaaaaaataattcacctcgtgttaggaagaaaagaaaactggacaagggtctgggaatgagggagtggatcacattgctggggtgagttagggaattttctgaggaggtggctttgagccgaggcctgaaagaggagaaagagctggccaggagaaagataggggaacagcataccaggcagaaggaacagcacctgcgaaggcccggaggtggcaacaagttggtaggtttaagaaatgggaattggtaagccaggcactgtggctcacgcctgtaatcccagcactttgggaggccgaggcaggcagatcacctgaggtcagtaattcaagaccagcctggccaacatagtgaaacccttgtctctataaaaatacaaaaattacctgggtgtggtgttgtgtgcctgtaagcccagctactcggtaggctgagggaagataattgtttatgcccgagaggcggaggctgcagtaagccgaggttgcactgttgcactctggcctgggcaacaaagggagactccatctcaaaaaaaaaaaaaaaaaaaaaaaaagccaggcacagtggctcacacctgtaatcccagcattttgggaggctgaggtgggcagattgcctgagttcaggagttcaagaccaacctggccagcatggtgacaccctgtctctactaaaaatacaaaaaaaaatagccaggcatggtggcatggggcagtaatcccagctacttgggaggctgacgtaagggaattgcttgaaccagggaggtggaggtttcagtgagccaagatcgcaccactgcactctagcctgggccacagagcaagactttcacctcaaaaaaaaaaaaaaaaaagggaattgggagccaagggccagggtggagggaagttcattgcttcaggggctgggtgaggacttaggatttgattctgggagaatgttgaggttttgaggaatgtgatctacttggggatcacaggaagcctgctgtggccaatttggagagcagggcctatccctggggcagaggctagagcagtggccaggtgatatggaccagagcggggcctgtgagtggatctgagatatgttttgggggctgaaagacaggccatagccacggggtgtgagaaagagaagattcaagggtgactggtgactttttttttctttcgagacagagtttcgctcttgttgcccaggctgtagtgtaatggcacagtctcactgcaacctgcaacctctgcctcccattttcaagcaattctcctgcctcagcctcccgagtagctgggattacaggtgcccaccaccatgcccaattaattgtattttttagtagagacaggatttcaccatgttggccaggctggtctcgaactcctgacctcacgggatccacccacctaggcctcccaaattgctaagattacaggcgtgagccaccacatccggtggtgactggtgattattaagcatgattacttgtttttcagaaagccaggagtcacacagttacctggggaatggggctgccattacttgcatggggaaaattgggggaagcaccaggctttgggtgggttccaatttcgctggagcatcacatgagtcccagatggagccagcagaggcagctgaatgtttggatctggaattatgggggacctggctcaactgaaggtgaaacagacctaacaggtctgggggcagttgccagcatctggctgttggtcagatgcgggggtgctcccaagagccctgattcctgggacccagccagctatccctcccccatctggagtggaatggggtaaggatggggctcccagggactagggatggggtatagtggggtgtcctctggtctcagctgcagcacacatcaacctaccactcctgattttttatcttttatttttgagacaaagtctcactctgttgcccaggctggagtgcagtggtgccatctcggctcactccaacctccaactccctgtttcatgtgattctcccacctcagcctcctgagtagctgggattacaggcgcccaccacgatgccaggctaatctttttttttattttttatttttttatttttagtagagacagggtttcaccctgttggccaggctggtctctaactcctggcctcaagtaatccacccacctcggcctaaagtgctaggattacaggcatgaactgctgcacctggccctgctactcctgattaattgccctcttcattaagaagctgggatggggatggagggcctgatgggaggctcctgggtggggaaggccttcgtaggagaccctgagctacctcccctttttgttttgttttgtttttttttttgagacgacgtctcactctgtcacccaggctggagtgcagtggcgcagtcacagctcactgcagcctcggccccctgggataaagcaatcctcccacctcagcctcccaaagttctgagattacaggcgaccgcgaccacacctagctgagagctcccttttgttgttgttgggttttgttgttgttgttgttgttgtttgttttggtttgttttttgagacagggccttccctcttgtcacccaggctggagtgcaatgacgcgatcttggctcaccgcaacctccgcctcctgggttcaagcgatccttctgcctcagcctcccgagtagctgggattacagtcatgcaccaccacacccaggtaattttgtattgttagtagagacggggtttctccatgtcgatcaggctggtctcaaactcacaacctcaggtgatccacctgccttggcctcccacactgctaggattacaggcatgagccacagtgaccagctttttttttttctttttctttctttctttttttattttctgttgagatggagtctcactccttcacccaggctgaagtgcagtggcgcgatattgtctcactgcaacctctgcctcccaggttcaggtgatcttcctgcctcagcatgccgagtagctgggactgcaggcgcgtgccaccatgcactgctaattttttgtatttgtagtagagacagggtttcaccatgttggccaggatggtctcgatctcttgacctcatgatccgccagttgtggcctcccaaagtgctgggattacaagcatgagccactgtgcctagcctgttgttggttttttgtttgtttgtttgtttgtttgtttgtttgtttgagacagagtcgcactctgttgcccaggctggagtgcagtggcacaatctcggctcactgcaacctccacctcctgggttcaagcaattctcctgcctcagcctcccaggtagctaggattacaggtgcctgtcacaacacccagcttattttttgtatttttagtagagacagggtttctccaggttggcgaggctggtctcaaactcctgtcctcaagtgatccacctgcctcagcctcccaaagtgctgggattacatgtgtgagccaccgtgcctggcctctttgctgttccttaaacctgcctcggggcctttgcatgtgctgtgccatctgccggggacacccttcccccggctgttaaaatggccagctgcttgtttccatccatacttcagctaaaatgtcaacttcccggagaaggccctcctgcccagctcgagcagtctcatgagcactcacccaaccccacattttctcttttttcttgccttaacatctgtctcatgagccctgtcattttggggcctgtcactgcagttctgtgtcctacacactcagcatgtggcttggcacacagcgggtgcccatgtgcaggtgaaatgactgatgctgtgagctgagtgtgggagaggtcatcagaaggtcctttatttatttattattatcattattttttgagacggagtctcgctctgttgtccaggctggagtgcagtggcgcaatctcagctcactacaaacttcacctcccaggttcaaacgattctactgcctcagcctcccgagtaggtgggattacaggcacctgccaccatgcccagctaattttttttttttttttttgagacagagtcttactctgtcatccaggctggagtgcagtgcagtggtgtgatcttggctcactgcaacccctgccttccgggttcaagcgatcctcctgcctcagcctcccaagtagctgggattacaggtgcccgccaccacaccaggctaatttttttttttttttttttgagatggagtctcgctctgtcacccagcctggagtgcagtggcatgatcacggttcactgcagcctcgacctcccgtgctcaagcagtcctcctaccttagcctcccaagtagctgggactacaggcgtacaccaccatgactggctatttttttttttttaatagagatagggtcttactgtgttacccaggatggtcttgaactcctcggctcaagcgatccacctgcctcggcctcccaaagcgctgagattacaggcgtgagccaccgcgcccagactacccttttcctttcctcttcctgcagatggctggagtgtggataaataaacattaaggcatatgcagctacgcctgccctaggagacccgaggctcaccctgagcaccctcattccacacaaagttagcccagttttttaacacacaaaaacgctgagttctggccaggtatggtggttcatgcctgtaatcccagcactttgggaggctgaggcaggtgggtcacttaagatcaggggttcaagaccagcctggccaacatggagaaacccgtctctactaaaaatacaaaaatcagccgggcgtcaaggcttgtgcctgtaactccagctgctcgggaagctgagggaggagaatcacttaaacccgggaagcagagatggcagagagcaaaaatcacatcactgcactccagcctgggcgacagagtgagaccctgtctaaaaaacaaaacaaaacaacaacagaaaccactgagtcctagagaggttaccagccactcaggtgatgggcctgggatttgaatccagcccccgcagggttttcctcttggctcagtttcccagaatgggggcactggctgtgatctgaagttgtgacctcatgacccactgctcaggcccgggggcagccaggtccccttttcttgggtgagtcaaaaccttgtgtccaggcacaagggatctcctgctcccaaaagcagtggccacagccctgggctggacagttggatcaggtccccaattccctggtggcctctctgggcctcagtgggcccctgtgagctggtccccgagcagctctaagtgtttcttttttttttggtggtggggacagagtctcactctgtctcccaggctggagtgcagtggcgtgatctcaactcactgcaacctccgcctcccaggttcaagcaattctcctgcctcagcctccaagtagctggactacaggcatgagccaccatgcccagctaagttttttgtgtgtctagtagagacggggtttctccatgttggccaggttggtcttgaactcctgacctcaagtgatccgcctgcttcgccctcccaaagtgctaggattgcaggcgtgagccaccgcgcctggccagctctgggtatttctcagtagagggtctctgggatctccccaccatggcctgggccacccccaccccctactcacttcactcagcaggaaggagagtgttgtcctgctgtgcctcatgctgctggcatctgtggccctgcagaaatggttctgagacctccagaccactgggagcccaggtacggccctgtgggacaccccctagacagaagctcactcccacactctctgcaccctcccttgaaccccaaggaactaaatcaaggtggcatggaccacaccacaggcaccagtgtgagacacccgcccggaccttgcagcggtccccatccagggacagcagccaggtgcccaaagcccctccccacacctgtccaggttcagcagcctgggtgggggcatcaggactggcgaaacaaggtctcctggccccagacacatgggagacccattcagctcccagagtggctctgatggtttcagggggattacgagaccccagcacctctcctgagacgcccccaagctcaagaataagcttgctccaggaggcccaggcatgtctggcacttaccaccactgcggagtcctgcctgggtcccatgacctgctggctagtgagggaaggaggggagaaaatgacctgaccaagagggaggcccagggctccctcaacacccactcagcggagccccttaactgtctgggcaccaggccaggacataatccacacactttccttgggtgaggctcccagtgggtggagggcagagtgtccaagagggcctgaggggacgagagagtggccaagagggtggccgggcatggagggggaggggcggggagggcagaggaaggaggggggaaggagggaagggaggcgtaggagtgaggaggctgggtgagaggtgttaagattaattgttcatgtgtttgcatatgatagagtgagagagagggcgcgaaggaagatggtggtaggggaccagcagctctgggaagggggggattttatcaactcagggtctaggatatctgcttccaagcagagcccatggggtgtggcctaaggagcttgggggctccaggaaagttgcccgctgtgctgtgccgccccgggtagatcaaagaccctctctggtcattggctgggcgcggtggctcacgcctgtaatcccagcactttgggaggcggaggcgggtggatcacgagatcaggagatcgagaccatcctggccaacatggtgaagccccatctctactaaaaatacaaaaaaattagctgagtgtggtggcaggtgcctgtaatcccagctacttgggaggctgaagcaggagaatcgtttgaacccaggaggcagaggttgcagtgagctgagatcgtgtcactgcactccagtgtgggcaacaagagcgaaactccatcttattaaaaaaaaaaaaaaaagaatggcttgaacccaggagtcagaggctgcagtgagccaagactgcactactgcactccagcctaggtgacagagggagactgtctcaaaaaagaaaaaaagagagagagatggggttttgccattttgcccaatttggtctcaaactaccaagctcaagcaattcacccacctcagcttctcaaagtgctgagattacagtggtaagccaccatgcccggcacccccagttttgtttgtttgttttgagacagggtctcactctgtcacccagactagagtgcagtggtgcaatctcagcttaccgcaacctctgactcccaggctcaaccaattctcctgcctcagcctccctaatagctgggattacaggcacacaccaccacgcctggctaatttttgtatttttagtaaagatggggtttcaccatgttgaccaggctggtcttgaactcctgacctcaaatgatccacccacctttgccttccaaagtgctgggattacaggtgtaagccactacgcctggccctattttttttttttttgagatggagtcttgctctgttgcccaggctggagtacaatggggcgatctcagctcactgcaacctccgcctccctggttcaagcgattctctgcctcagcctcctgagtagctgggattacaggcacctgccaccacgctcagctaatttttgtatttttagtacagacagagtttcgccatgttagccaggctggtctcaaactcctaagctcaggagatctgcccgccttggcctcccaaagtgctgggattacaggtgtgaaccaccgcacccagccaagtgagctcctgattcttatctgtccctgccttgagtctgtggatcccctgaaagtaaagacatggtccccactgtgaccccagcacagagcccagcacatagtaggtgctcagttaatgttttcacacgagtccataactcgtgttttcacacgaggccttggatgaatggtaggggctttatttcctcaggttctgctcctccccaggaaccccagccccatccatgcccccatctctgttggctcctcagggctcactcctggaggtggtgggcaaaggacaatctgtcattcacggatccctgaggaaggaacacacagggaggcattcagacaccaaaaggctctgcagcccaggttggccctgcttgggatagcagctcccccaaccatgccttggccccagggctgagcccccagcccagccctaccttaccatggacacctcgtccaggttctcaaacttggactcattccggtgacagaatctcacagccatgaccacagacccgatgagcaaaagagacaccagcaaacacacgaccaccaccacactcgggttcctgtgtaactcacggggcccagtgtcacctggagctggggaaaggaactcagagtcagcactgggtcctattccccacaagcctaagacacccaccagggcccagagccttttaaaatctgttctcaggaagctgacctctcttccctctccagttgaggctgccactttttaatcatgtattttagagacagggtctcactctgtcacccaggctggagtgcagtagtgcaatcacagctcactgcagcctctatctcctgggctcaagtgatcctcccacctcagcctcccaagtagctaggattacaggcatgcaccaccatgcctggacaattttttttttttttttttgagacagggtcttgctctgtcacacaggctggagtgcagtgacgttatctcagcttactgtgacctccatctccaaggatctagtgatcctcttacctcagcctccccagtagctgagactacaagtgtgtgccaccacacccagctaatttgtgtacatatttagtagagatggggtttcaccatgttgcccaggctggtcttgaactcattggctcaggtgatccacccgcctcggcctcccaaagtgctgggattacaggcgtgggccactgagcccagcctaatttttaaattttatttaatcaattactttatttatttttgagatagagtcttttttttcccccccgagatggagtcttgctctgtctcccaggctggagtgcagtggttcaatgtgggctcactccaacctccgcctcctgggttcaaattattttcctgcctcagcctcccaagtagcccggattacaggcgcccgccaccatgcctggctattttttgtatttttagtagagacggggtttcaccatgttggccaggctggtcttgaactcctgacctcaggtgatcctcccaccttggcctcccaaagtgctgggattacagatgtgaaccaccacgcccagccatttttattttatttatttatttatttgagacagagtcttactctgccacccaggctggagtgcagtggcacgatctcagctcactgcaacctctgccgcctgggttcaagcgattctcctgcctcagcctcccgagttgctgagattacaggcgtctgccaccacgcctggctaatttttgtagttttaatagagacggggtttcaccattttggccaggctggtcttgaactcttgacctcgtgatacacgccccccccgcccccgcccccgccctcggcctcccaaagtgctgggattacaggcttgagccaccgcgccccgccatttttagatttttttgtagagacaaagtcctgctattttgcccaggcccaaatacataatgtataacctgtctccccaccacagcaagtattagtttctctctttgcccatcgctgcgtgcccagccgtgacatacactaggcacttaataaatgcgcatagcatgaagagctttagacaatggagcagagacaagaagcccttcctagagcattctcggggctgtacctccccctggtggtcagttccaaaactgcagcctgttacacccgccacctccctacaaacacccaaatctcttaatactcacctgggccagggggctccaaggtctggtcagtggaggtcaagggctccgttccggggctgtgggaagtggggctccagtgcggggtcagggattcggaactggggagggtggaatgggaagagggggtgagctctgcactgggggagccagaactagggtgcgtgattgtctctggttgtggggaggagggtatcatccttgaatctgtggagctggggctcggctggatggtaggggttgcccctgaacttgaggggctgaggtgggttatggagtctgtctccaaactcatggtgctggagtaggatttggggggttcccctgaactgtgggtgctgtgggcgaagggagaagaaatcagagagctgacaggtgatgtctccatactgttctctgaggtcacaatatctggaaagaaaaactgggcgcggtggctcacgcctgtaattccagcactttgagaggtcaaggtgagagcatcacttgaacccaggaattagagaccagcctgggcaacatagcgagaccctctctctctctctttctctctctctttttttttttctttttttgagatggcgtctcgctctgtcacccaggctggagagcagtggtgccatctcagctcactgcaacctccacctcctgggtacaagcaattctcctgcctcagcctcccaagtagctgggattacaggcgtgcattaccacgcctggctaatttttgcatttttagtttcactgtgctggccagatttgtctcgaacttctgacctcagatgatccacctgccttggcctcccaaagtgctgggattacaggcataagccatcatgcccagccttttcatttttatttttaattaatttatttttttgtccaggtcatagggagacctgaaagatttaggacaccatgtgagctctcagtgggaaactgaagctcccactcaaattcatgctcctggtctgaagtcccacagcctgggttcaagtgcagatcagcgttcccagtcctcttggctgagagctctagaagccctttggatatgggaagtgactgcatcccaggcagtgctgggcagctcctttaaattttctgggactcagttttcttttctgtaaaatggagttcatgtggagttggtgcctctgacagttcatcagtcaggttcatagtgggtgtacacaagctgggtgctcccagctactggggaggctgaggcgggaggattgcctgaccccaggaattcaaggctgtagtgcgccatgattgcgccactgcactcctgcctgggagacataatgagaccttgtctctacaaaaaaataaaacaaaaattagccaggcatggtggtgcatgcctagtcccagctactcaggaggctgaggtgggaggatcgcttgagtccaggagttcaaggctgcagtaagccatgatcatgccactgaactccagcctaggcaacagagtgagactccgtctcaaaaaaaaaaaaaacacacacacacaatagaatagaaacacagtgggtgcacagtgacactcaactataaagatccacctatgagctcagagaggatcagccctaattttctccaggtagccctaggctaacctcaactttaatggaagacacaaagacacaggcgctgggaacatgtctccggaacccacccttctacgtgttggtccagctacttcctggctcacatcccatcccaggcatggagtccagggaccaggctgagggcaggtaagcagttcatgagccacctcccacaacgacttcccacccagttccaggtgactgggcctcttaggcacttacaagttcattcatcaactctctgctccacccatgcactctgctctgggccaaactttgtgcttcctccttgactcaccctaggcagcagaaatgcggaaataacacacaacactggccctgagagggggctgggtccacatgccaccctccccagatctctatgtagccccccaggccctgtggggatgacggctgagtctagaagaggcatggaactcaggctgggcttcatccccatttgacagatgagaaactgaggctcagagtagcagagggtctggcctgaggtgactggggagctgggaagaacgcccctcaaggacccttgtcctctgtttctgctgaaatgaagatgattcagaggccagagtggaccccaagccaagtcagaattctggggagctgagtgcttagtgaactgaggaaaagctgtggacttgaaaaaggaagagttggaggacacaagccctgttgagtgcctggcactgagtaggcactggtgagctgctgaagggttgaccagaaggtaaaaataaagatgtttctaggcactgtgctgggtgtttgctctccccagagactcctagactgggaggctcacatgagccaagtcaaccagttctaatctgggtctgggacaagctggactgagcctcagtttcctgagctatgaaatggggataaaagtggtgccttctgaatgaaacccttccctgcaatgagcatttcagcagccatggtggcctctgctctgctattacaggtctgtggggtaggacaccggtcagagagagtgacaacatagtggcaggtaaagggcagaaaaagggaatgcgagaagctcaaggctcctcccctccaccctaggcactgtcttataggagagcaagagggaattaagtcagacacccagaagaacttctcatgggaaccacagatgtttgatgaccaggaagtgagtccctgttccctggaacccccatggccctgaggtcttcaccattctccctttggggattggctaaaagcaacagatttgaaaaggagcccaaaagtaggtgtgaggccatctgtggcctccagcaggttcagggctcactggagttgcaggacccacagccccagggcttgggagcagcggtgcctcatctgtcctcacagctgctccgtttgtttctgggggaaaacccagccttcctcggagggttggcggaccagcgtggcctgagggaggggtccagaagccaggtgtgtgactgggctgtgcgtcccccacccccacccttccgctttctggaagctgagcctctttaccagctcttacctgtaaagggagtattgtaattcacaccagctttcagcagcaccaccagcaccaaaagcagaagtggcggcagctgggggcacgccattcctgcgccgggagggcctgccaccggctctgcacaggtgtgtggccaggtgtgtgcccaggtgccagctccttgcacctgcgtgtgcgctccctgctggcggagcgcggggctgtgcaggggcaaggcgcaggtggggctgcagggtgtgggacctccctggggcgctcctgttcccccgggtgcggttctcgccctcttcacctggactccaccccttctaaacacgacgacccagaagctctcaaagccagtcatccactaaagacaccctgcccctgccgtcctctttccccctgctcctggttccacagctgcccaaacccctgctgtcactccctctgcccctcgtccagccaggttgtcccctctgggagcaccaatttctcccacctccctccgatccctgaacccacagggctggggatgtccttgttctctgtcctcgtcctcctctgtcctctgtctcacccagactggggccttttggggacatgactgaaaccttctaaccttctagcatttctattatggatttctttttctttcttttattcttttttttttttgagacggagtcttgctctgtcacccagactggagcgcagtgatgcaatcttggctcactgcaacctctgcctcccgggttcaagtaattctcctgcctcagcctcccgagtagctggcgcccgctaccaggcctggctaatttttgtattttttagcagagacagggtttcaccatgttggccaggctggtctcgaactcctgacctcaagtgatccacccgcctcggcctcccaaactgctaggattacaggcatgagccaccgtgcccagccctttttttttttttttttaagagacggggtctcactctgtcgcccaggctgaagcacagtggcacaatcacagctcactgcattctcaaactctgggattcaagcaacctcccgcctcagcctcccaagtagctgcgattacaggcgtgtaccaccatgcccggctaattttttttttttttttttgagactgagtttagctcttgttgcccaggctggaatgcaatggcacaatcttggctcaccacaacctccgcctcccgggtccaagcgattctcctgcctcagcttcctgagtagctgggattacaggcatgtgccaccatggccggctaattttgtatttttagtagagacggggtttctccatgttggtcaggctgatctcgaacttctgacctcaggtgatctgcccacctcggcctcccaaagtgctgggattacaggcgtgagccaccgtgcctggcctttttttgttgttgtatttttttttagtatagatggggttttaccatgttggccaggctgatagctctaactcctgacctcaggtgacccactcgtcttggtttcccaaagtgctgggattacaggcatgagccaccacacccagccatcctgtaggattttttaggggtgagggacttgaggtgagtgctctgggccaggtcccaggcacatttctagagtgcactggggacagtttccatctgggacgggctggacaccaccccactacctgtacgtggatatggcagaggcacagctgagaccacattggcagtgcctgacctccaggaaagatttgaggtccccatgctggccacagaccccagatgcatactgcatggttggtaacttcagagttctcttccctctgggatgttccagattcccccactatacccaagccacttccattaacccagaacacatcacccaagatctaggctgtggaggactttattcattagacccagagagccatgagtgcctcccacgaagtccccactgcagggagccagggtcctagatgccaggccaatgcatgtgccgtgagctggccgaggggtctgctggtcccaagagcgcctctgtgttcttcagacagctccgggtatggtggcctcgccaggtggcttgaactatcttcgctgccatttgctgctgcctcatctgctggcggatcttaaagcccctccaggcggactggatggctgtggccgctttgtcctggcgatgcggctgcctgggactcagggcagccagctggtaggcggaggcccaagacactgccccggggccctcagtgccctggcccatgccctgcaccacacgggtgggctgtgtgcgtccacaggtatgacaggtgcgagggctggagcccactagcatcaccacgctgggcgggctcccgatcctggagctcagggagtggcagacgctgcaagcgtgtgcctggcaggactggaagcagcgatggtcagatactgtcctggctctgccatcctggaaccagcttcggtcagacatgaccccggcccggctgcccagctccacccacgtgacggggtggagcatctgccagtgccgggcttggtcccggcgggtgctgtagccgcgccaggcagactggatggtcgtggtggctctgcagaggtgtgccaggttccgccgcacacggtagccgcgccaagtagcttggatgaccatggccccccggtgccacagccggatcctgcgacgcgccaggtagccacggacgcccgcctggatagtgatcactgcgaggatgcggatctcctctgcagcctgcatggacaccattggctccccggaccgcctgggaggcaccaccgccttgttgcgccaggtgtcccaggacgcagcacccctggctggctcccatgcgcggttccacgattggccaccaaccacaccagcgtccgcggggccctggagtatagtggagttcagggatgccttgtgactaacggcaggattctgggggctataggagtcctgccgtctccacggtgactcctggttaaaaaggggtggcagggaaccacttggggaagactcatagcctagagacaccctccgaactcccggggccagcggaggaatgaccgaggagtgtgtcatctccccagtgcggatgacgggccttacctctgcagagggcctgtgggtggggtttgcaccacttcgggctgaggcctgggatggttgtctttgcacatactgtaagggcctaaccctggccacagaactttctagcagttctggaacaatcctaccatgcacggatctgtaggaatttttagggcccatggcgtcccagcggctgctcggagccatgtttccagacactgttttctggagtggattggggacagcttctgtctggaagggactggacaatgcccttctagccgaggacggatatagtggcacatgtgagaccatgctggtggtccctgacctctgaagaagactaggattccccatcctgcccacagacactgaaagcaatctgaaagcctcagtactgccacgggccagctggggtgatcctgagactacattagaagccactgtaccctgagagtgatttgggggtatgacgtgagtgacagacccctgttgataaactgagggggacttagtggctaaacccggggcctggaaagggacagggaccatgccactagcatggctgggagccacctcccttggggaagagaccctttctcagacagggacctatgatcatggcccccatcagctcccagaggactggagtacatccactgggttgcaccagtgaccctggctttgctgaataggtcattggatccacttgatcctgacacttggaacacagcctcatccaattctcctagcttggcttggtcccctgtgaccccagatggcattatcctagcatcttggctcaattgtaaggctcttgatagaaccgtgggcactcggtgtagactcctcactgtgccactagctgccggggctgaggagtgacctggagccagactggtggtgtggggcatctgcaagggggctaaagacctctccccagccaggctttgaggtaaggaggggcagtgatgtcaatcaccatgggccccttggagcagctctgagccacactagaggcccccatcattggcacagaaccagggggacaactgggctcacccgactcactactgaacctgggagcaagtttggagcagctaagctagcggagggtcttacagatagacttggcttctttctgtctgccatcagactgggagccacccaactggacacagagcctgcgggaaggctgtgacccatgcctcggatggtggagcccgggggaaggctggaggttatgccaccaggcagagtgcctgggactgcgcccgtgctcattctactggctacaaaacctcctgccgcaccacgaccagccctgctcttcagagagtcctgcggaatcacatctctctgctggtaactgggtgggaccatggatgcctcagaagggtgccagcagtctatgttttttggaataaccacactgatctgggagctgctggggtccatgctgttcagggaaagattagactgagtcacggccagtctgttgggcactgaagccagagaggggctgggggccatccctgtggttccagagggatgtgtcaaagggccacctgcctctaagacctgggatgcaagggaagccatgccattggccacctgacattgactttggcccatgccagttgctatggttctccaggggagattcccagctaggccaggagatgtggtcccctgagacccactggggaacatagcatcagccaaaggctcctggggatggcttacagccacacccctgaacagaggcgtgattcactggcctacacaacaggcctcctcatcagcatgagagagatttggtgttgaaacactaaccacagagggtggacacacatgcctcccaccaaccctgggtggatgatggaacccaagggacacgtcgttgaacttgaagtccggggggctggataccatctcactaaccatcagaggttcttcacataggttcaccccagtacccagggatggctggttcagaccctggtccatatttccagccacagagggatatggtccacccaggctaactgaaacaaacgctgatgggtgacacagacacggggctactgagtccacccttgaacactgcagatttgaatccagcctagagccccagcatggctcattgaggccatgacatgtaccactgaccacagatggctgggatcggcttggggccaacctagtgtccgggggtgactgagccaggcttagggcttccgtgtgggccacagatggtgggaataggctgggggctatagctggctcggctaggctggaggctagggtacaggatgaatttgtcttgcctggactggaggccacagatggttgggcttgccttggggatactgcagtggtctgagatgggtgggctaggctggagcccgccccactggccacatatgggtgagctagacttggagacaacccatggggtcctgatgggtgggctaggcttggggacacaccaatggcttgagatggctgggctgggcttaaggacaccacacaggtcataggttggtgggctagccttgaagacatccctgtggcttgagacggctgggctaggcttggggatacaccacaggccataggttgatgagctggtcttaagggcactgcagtggtggcctgagatagctgggcaaggcttggggacacctcactgggcatagatcgatgaacctggcttggggacaccatacaggtcatagatgcatgagctctgctaggggacatcctgctggttatagatgcgtgagcttggtttggggacaccctggaggccactggtgggtaatcttgtctaggggacatcccactggcttgagatggctgggctaggcttgaggaaaccctactggccacagattggtgggctacacttggggacaccccagtggcctgagatggccaggtcaagcttggggattccccagtggactgaggaggctgggccaggcttggagactcccgaatggccatagatgggtgagctagggttggggacactccaatggtgtgaaatggcatggctaggcttggggacactccaatggtctgagatggcatggctaggcttggggacactccaatagtctgagatgacatggctaggcttggggacactctgatggtcagagatggctgggtcaggcttggagactccccagtgggctgagatgggtaggctgggcttggggacatctcagtgggctgagatgggtaggctgggcttggggactccccagtgaccacagatgggtcgcctgggcttggggacacctcagtggccataaatgggtaggctgggcttgggaacacctcagtgcgctgatatgactgggccaggcttggagactccccagtgaccacagatgggtaggctgagcttggggacacctcagtgggctgagatggctgggcaaggctaggggactccccagtggccacacatggatagtctgggcttggggacacctcagtgggctgaaatgggtagcctgggcttggggacacctcagtggccatagataggtagcctgagcttggggacatctcagtaggctgagatgagtagtctgggcttggggacacttcagtggccacagataggtagcctgagcttggggacacctcagtgagctgagatgggtagcctgggcttggggacacctcagtggccacagataggtagcctgagcttggggatatctcagtgggctgatatgggtaggttgggcttggggacacctcagtggccacagatgggtattctgggcttggggacatctcaatggccatagataggtagcctgggtttggggacacctcagtgggctgatatgagtaggctgcacttggggacacctcagtgagctgatatgggtgggctgggcttggagatacctcagtgggctgaaatggctgtgccagggttgggtactccctaatggcctgagatgggtaggttggacttggggacacctcagtgggctgaaatggctgagccagcattgggtactccccaacagactgagatgggtagtctggacttggagacaccccaaaggcttgagatggctgggccagatttgaggttaccccaggggcttgagatggctgggctaggcttgagggctccccactgtccatagatggctgggctaggttttgggacccccagttagccattgattggtgaccttggtctgaggccactctaaaggtccttgatgggtgtcctcggcttggggacctcctagtcaccacagatggctgtgctggtcttggtgtcactctattaggcacagaggagtgtggtagccttggggtcacccaattacccatagatgggcaggttagccttggggataccttactggatgctatatgctgggataggcttggggccagcctactgaaccctgatgcctggcctaggtttggggctaccctactggccagtgtagcctgggacacaattggggccaagctcttggccacagatggtggcttatatgcagtggagaccacagtacctaaagacagagtcctcctcagctctgtcttgacggttgcctgggacacctcaatcagattcacagagctcttgcctaaggagaacttgtggatctcagcctctgagccccagtgaacacgcaaggtcaagcagttagacactgagctgtgttggaaactgggcactttctccgaggctggagtgggccggtaggggaagtgtagggtcatgtacctatagccggtttcagtctcttgcgtatccttaaacctctggagtgtccccatggactccggaggaaaaacagacttcaccgcaaggtccccttctaaactgctttcccgtgactcatctatcttgttgacggcaggcaggctggccacagacatagtggaaaggctgagggaactagaactttgcagagagctttcggaattgttctcctgactgtaggtcacaaagccctgggagaagctcctggccaggtcaccgtctcgatcctgtggcaaaccacctactggctcaccgaggatggatggctggtggtctgttgctagcttctgggggcagagcagggcagacacagaaccctgtgttcgattcctcccctgtccacagacagatgtcttgggacgaacttgagccaatgcactgccgggggaagcttgaaacagaccatgagtcttggatgcctgagttttggtcaccatggtgacctgcaagggacttggggcccccttgtctatcacctccctagtacccgggggggcctgtttgcgatttgggggctgatacctcctccccaggctctccctggaagccctggatgcctgctgctggcctctggccactaagggttggtagagaccacgatgtacccctgaggactgacaccaaggcaggcccccacaggtgaggtaaggctggtgaacatgggcagccctcccaccacccacgctgcaaggaagcctacccgaggccaccctgccctccctggtcgatagataagaggccaccctgctgaccacatgtggcctgtggcagctcggggctgtgccatagatcacagagggctggttcatgcttgggcccacacagttggcaatgagaggctgccacagactcgggggtggctgcatgtgggacagcttgagcaaactggggccctccccactcccctcggggttaaaatctgatgccaatgtgccaggctccagggtcgggcatgcttcttccttttggaacttggggctcaaatccaggtttgaggagaagtccctgctggactccatcatctcccgggacagcatgggatacaggccagtgatcaggggaccctggtgaatgctggtgatgacgctacccatcaccgaggctcccacagtgaccacagataagcagggtgacccccacaagatggccccatcaatcccccatctcctccaagggcccggcaggttggcccatggtgaaacaaccccagatcccaacctgggaatccctgaccttgctggtctgtggtctcacggggcccagggagggcccccatgcggccgatggactcctcctgcaggccaccttcaccagggccggcgtcttagtcaccccgcttcctgttgatttcgaggcggccttggggaggatggttccagtcctcagggccacccgacaccaagactggctcaggagagcacccagctcaccctgacacagggcctggctcagagccacccactcctcctccgtcaaagccttgctaagcacctcggccaatttaccctgcatgaccttggtgagttccgcccgcagctcgccccgggacagggctcgggacagggtcaggcgcagctcactccaggacagcgccttcaccagcgccatgctcagcatgctctggggcagggctttggtgacagtggcacccaggacctccttggacagggcctggttcagagctgcccagacttctccctgggagagggctttggccaacagagtgcggagatcctcctgggatgccagcacaccagctacttcagcacacaaggaggccagcagggagcctaccgtgtcctcctggcagggcaccgcctggccgggcattgatggctgggcacgtgtggctccgttgtctccccaggactcaacgttgcatgtggaatggccggtgggtgccatcggcggcaccagcataccctggacctcacaggctgccgggcatggtcccccctgagtggtcttccccggcacgtgtccgtggggctgtggctgggtctgtctgtcctctggcttggcccagggtggggcgctgaggccaccgaggcgctggcaggcgtggttggacaccttggaccctgttaggagcacctgggagtgggtgttgctgctgagatcagcagcctggtgcgctgggatgaggcacgtggttatgtctgtgatcggctgcccccgggactgcgtcttggtcagacaggtggctagaggcgcttgggactggaccttcacggcacctgtggccagatgtgtctgggaatgcatcttgctcagacaggtgtccagatgggccagggatggggtcttggtcagctcagtgggcagatgtccctgagatgaggccttggtcagcggggcggccagtggtctctgggacaggcagggtggatgtctctgggatgaggcattggtcagtggggcagccagctgtccccggggcagggtgacagccatgtctacaggcacatacacgtgaggtggcttgtccccttcctcagcaacttttgtccaggatggagccccagccatttccactgccacactggtcttaaatgccatgtctgttttcgcctgtttctgggtgccagtcttgattttctcggcttccaaaggaagctcagctgcagccctggggaccccagttcccggatgtggttgagccaggcacctgatcttcccctcagccaaataggagggggatgaggctttcaccacctttgcagcctgcttcacattcacggtggccttggccttgggtgggttctcatggatggagcctgaggtgttgggagttccggctgctaccgccacttggggtggagccttgacatttgccactgttggagaggccagacacagagtcttgaggatggtggccaccgagcgtaactgggctggggtcttggttatcatggctggcaggcgggtctggggtgagggcttggtcaccccaactgggctcctctgggatgaagtcttggacattgtggctgacagacatgtttgcaatgggtttttggctggggtggtgaccgggtgcatctggggtggggtctttgccatcgcaggccccgggcatacctggggcaggctcttcatgatggaagccagaagggaaacctgaggtcggttctttgccgtgatggtcgcagggcatgtctgccgtggggtgccagttctggaggctgtggggtgtacctggatcttggtcattgtgggcatggggcatgtgtgaggtgcagttttggtcactgtgggccccggatacatctgggctggggtcttgattattgttactttgggaactgggctagtcttgggtggggtggtggtcatcgtggacgctggatatgtctgtggcagggtcacggagaccactggatatgtctggagtagagtcttggtgatcatgggccctggacatatctggaagggggctttgggggtctctgctttcacagggccctgggtttgggctctggatggtctcgtaactgcctggtcataccttctggacaatggtgtctccggagccctggctttgttggtccgggcacttacacgtttggtcttcactgagtcaccctctatgtggacgaggcaggtgcttctgatggttctggtcagcaggcatggctggcattttgcgtccagactcactgggcagggaaatctgatggtgaccgtctggtgtggcaggaaggccagcccccggactctggcagcatgaggaccctgcacacagggctctggggtaccctgagctgctgggggctgcaggaggggggacgactggggtctgcagaggaccagattgtcacaggaagggaactgggtctccttgttcaccatgatgggcggggacagaaggcggttctcttccggatgctggaagcgcacctgctgtggggcgtgataaggtatgtccccctcctccgccctcgttttctttaccaacgacttgctggagtgaaggatgtgtctcttgttgaagcgccgccaggcctcctggatggccttggccgccatcatctgggaaatcagcttctgccggagccaatagcccctccagttggcttggatgagcgtggctgcacgggcgtgcatcatgtccatctcgtctaccaggatgttcttgaaggcctggctctcgaccacagcccggaggcgtgggacgcggcgggacgccgtcttgccttcggcaggctgttgcggaagatgctccttggacttgaggccctcgtgctggggctgtggaggcgctttctccattttgtccaggagactggggtgagcgggggctggaggatgcaccgcccactgggtgacaactggctcgtgaactgtagctaggcggccggctgcattgccttgattaccggacaggtcagctctgcctgtgggggcggcagggggtggtcagggtgtagcaggtcctgcaaacaagaggtctcctggctggggtggacactggccccccaggcccagatcttgttcctggcacgttgcgatcttccgcctccctttttccatccctccctctcccaagtggtctttgccatccttatatccacctctcatcaccctacggccacttcatcttggcacacagtgtatgacacctgaatgcccgaccacttacctgcttttcttttttcttttctttttttttttttttttgagacagagttttgctcttgttgcccaggctggagtgcaatgctgtgatcttggctcaccacaacctccgcctcctgggttcaagcgattctcctgcctcagcctcccgagtagctgggattacaggtgcacgccaccatgcctggctggctacttttctgtatttttagtaaagacggggtttcaccatgttggccaggctggtctcgaactcccgacctcgggtgatccacctgactcagcctcccaaagtgctgggattacaggtgtgagccaccgcgcccggcctgcttttcaaactttatcttggatgtaccctgggtttagcactgatcacaatgttttggaaatttcctgtttgcctctgtgtgtgtgtgtgtgtgtgtgtgtgtgtgtgtgtgtgtgtgtttgaaaaagagagagagagaagtgtggtgggggagattatttgcctctccccattgattgtgaatcctagaagacagagtcatttctgtgtccccatctcagtcatagagcttggttccaagctgtgaatgggtaggtattgggtggggggggcatcttgactgataaatggtgagtggattggaagttggatggacagatagatacaggactagatactgaatggatgaatcagtcgatgagtgaatggtagatgggttggaaagacagatgaaggtttggatgaataggtaaataaagctgatgaataaagtgttaaaggcaaattggcccggcacggtggctcatgtctgtcattccagcactttgggaggccaaggtgggcagattgcttggggtcaggagttcgaggccagccgggccaacatggtgaaacccgtctctactaaaaatacagaaaagtaggccaggcacagtggctcatgcctgtaatcccagcactttgggaggccgaggtgagcggatcacaaggtcaggagtttgagaccagcctggctaacgtggtgaaaccccatctctactgaaaatacaaaaattagctcggcatggtggctcgtgcctgtaatcccagctactcaggaggctgaggcaggagaattgtttgaacccggtaggcagaggttgcagtaagccgagatcgcgccacctcactccagcctgggtgacagagcaagactctgtctcaaaaaaaaaaaaaaaaaaaagagccaggtatggtggcatgagcctgtagtcccagctagtcgggaggctgaggcaggagcattgcttgaacccgggaggaggaggttgcagtgagccaagatcacgccatcacactccagcctgggcaacagaagtgaaactccgtgtcaaataaaaggaaagaaggaaggaagcaagggagggagggaaattaaagagagctggaaagactggtgaagagataacccaacaggaggtagactgatgggtggatgggtgggtgggtggattaggggatgggtaggtaaatggcatatggaaggatggaaagaaggaagaaaaagtggtgactgtggctttcagaagtaactaggatgcagagagagctgggacactgtcaagccaccctgatgcatagcctggagcacagcacacttgtttggcagaagcccctctcttcaggttggactagccagaccccttgcccatagaccatcttcttaccttgaagggtcatagatttggaggagtagcaggagaagaaggtgcaatctcagaagccagcctgcaagaggaggcagccttcagcctttcatccatgcaatatgcagcaacactgccctgggctggctcaagaccaacacaaaaagaaatgttaaaagcaaaaatgctaaattctaaaatttctaaattctaaaaaagctaaattctaaaaaaaaaaaaaaatgtgcaaagatgaggaaatttattccagtgttattttgtagctagaaatcaaacaaaacaactggaaataaccaaaacagtgattggtagaggttctgctacaaatgaatacagaagtatgttcaaggatgtttaacactgtattgtttagcagaggaaaaactggaagaaaccaaaattatcaatggagacaggcttaaattaatcatacaagggcatgatatccaggcatcagaaatggcgtccaggctgagcacagtggttcttgcctgcaatcccagcactttgggaggccaagatgggaggatcacttgaggacagaagtttgagaccagcctgggaaactaagcaagaactgtctcttaaaaaaaaaaaaaaaaaaaaaaaaaaattggccaggcgtggctcacgcctgtaattccagcactctgggaggccgaggagggtggatcacctgaggtcaggagttcgagaccagcctggccaacatggtaaaaccccgtctctactaaaaatacaagaaattagccaggcatagtggttgacgcctgtaattccagctactcaggaggctgaggcaggagaatatcttgaacctgggaggcagagatttcagtgagctgagatcgtgccattgtactccatctggggcaacaagagcaaaactgtctcaaaaaaaaaaaaaaaataggccgggcacagtggctcacgtctgtaaccccagcaatttggaaggccaaggtgggtgggtcacttgaggccaggagttccagaccagcctgggcaacatggtaaaacccgtctctactaaaaacataaaaattagccagtcatggtgacatgcacctgtagtcccagctactcgggaggctgagacaggaggatcatttgaggccaggaggttgagactgcagtaagctacgatggcaccactgcactcgagcctgagcgacagaatgagaccctatctcttttttgtttttaaaacagagtcccacccttttgcccaggctggagtgcagcgtcacaatctcggctcactgcaacctctgcttcccaggttcaagtgattcttgtgcctcagtctcccaagtagctgggatgacaagtgtaagccacggtgcctggctgagaccctgtctcaaaaaaaaaaaaaaaaagattgtgattaaagagtaagtataagataaaaggtaacctgggaggccaggcatggtggctcacacctgtcatcccagcacttcgggaggccaaggcaggtggatcacaaggtcaggagttcgagaacagcctggccaacatggtgaaaccccgtctctactaaaaatacaaaacttagccaggcacagtggcatgcacctgtaatcccagctacttcagaggctgaagcaggagaatcacttgaacccgagagatggagattgcagtgagccgagatcacgcaactgcactccagcctgggcgacagagtgagactctgtctcaaaaaaaaaaaaaaaaaaccaggcgcagtggctcacgcctgtaatcccagtgctttgggaggccgaggtgggtggctcacgtgaggtcaggagttcaagaccagcctggccaacatggtgaaactctgtctctactaaaaatacaaaaattagccaggtatgatggcaggtgcctgtaatcccagctacttaggaggctgaggcgggagaatctcttgaacccagtaggcaaaggttgcagtgagctgagatcataccattgcacaccagcctgggtgactgagcgaaactcagttcaaaaaaaaaaaaaaaagataaaaggaaactctatgtggtactttagggctgagggagtatccccaaaaaaggggcaaatttggagagcattcagacttccttggagaaagtatggtcccgcctaacaagttaacggagataattgctggatcggccaagccagagctggtctggagttgcaaaacaagcaaaaggcccaccctccagggtgcagatgtgggaacaggttatcaacagttggtgctctggatgtgcactggaaacctaagtgttgctggggcaggaggccttcaatgtgtatgggccaccgtgggggctctgttcgtttattatcatttatttatttatgatttttgagacagagtctcactctgtcccccaggctggagtgcagcggcactcagcatcttggctcactgcaacctccgcctcctgggttcaagcgattctcctgcctcagcctcccgagtagctgggattacaggcatgaatcccaccacacccagctaattttgtttgttttgttttgttttgtttttggagggacggggtttcaccatgttggccaggctggtctcaaactcctgatctcaggtgattcgcctgcctcggcctcccaaagtgctgggattacaggcgtgagccaccgcgcctggcctttttttttttctctctctcttttgagttttgttcttgtcgcccaggctggagtgcagtggcgcgatctcctttcactgcaacctctacctctcggtttccagcgattctcctacctcagcctcctgagcagctgggattacaggcacctgccaccacgcctagcaaatttttgtatttttagtacagatggggtttcatcatattggtcaggctggtctcaaattcctgaccacaggtgatccacccaccttggcctcccaaagtgctgggattacaggcatgagccaccgcgcccggccttaggggctctgttttttgtgtgtgttgagagggctgcagaaaggttttcaccaggtcaagactgcaaagtcacaggaccacgttctggatccagggctcgggcaggcttcacctggtgtcttcacacctctatccctaatgcctcaccagcgccctctattgagaaatcttagcattgtgctcactttttttttttttttgagacggagtctcgttctgtctcccaggctggagtgcactggcaccatctcggctcactgcaagctctgcctcccgggttcacgccattctcctgcctcagcctcctgagtagctgggactacaggcgcctgccaccacgcccagttaatattttgtatttttagtagagacggggtttcactatgctagccaggatggtctccatctcctgacctcgtgattcgcccacctcggcctcccaaagtgctgggattacaggcgtgagccaccgcgcctggccgagcattgtgctcactttaaacaagacataacgaaagaaattcctttgtttatcacatattgaaagggtccattcggagacaagaggcaatgcatggataattgacacacatatatttattatttttatttttttgagatggacggaatcttgctctgttgcccaggctgaagtgcagtggcacgatcttggctcactgcaacctccgcctcccaggttcaaagtgattctcctgtctcagcctcccgagtagctgggattacaggcacttgccaccacacttggctaacttttgtatttttagtagagttggggtttcgccatgttggccagactggtctcgaacccctgacctcaagtgatccgcccgcctcggcctcccaaagtgctgggattacaggcatgagtcaccatgcccggcctaattattattattattctctttgagacggaatttcacttttgttgcccaggctggagtgcaatggcgccatcttggctcactgcaacctctgcctccaggttcaagcgattctcctgcctcagcctcccaaatagctaggattacaggcatgcgccaccacacctaatttcgtatttttagtggaaatggggtttctccatgttggtcaggctggtcttgaactcctgatcacaggtgatctgcccgccttggcttcccaaagtgctggcgttacaggcgtgagccaccttgcccggcctaatttttgaatttttagtagagatggggtttgaccatatgggtcaggctggtctcgaactcctgaggcaggaaaatcacttgaacccgggagacagcagctctgggagctgaatgggcccattccaggggctgaggtttcatcaaccaaacggtgcagctctttagaggaactcaaccagaaggggtgagaaacgggattgtgggggatgagaagaaggaacaggggccccctggacacagaagccaagcgactggctcggtaattttgagtaaacccctctgagcctcaatttccctatctgtcacaagacataagatcaccatcctcaggttgccaaagagacacaacaggctcagctgggcgcagtggctcctgcccgtaatccaagcactttgggggaccaaggtgggaggatcgctgcagcccaagagtttgaaaacagcctgggcaacatgtctctatttatttaaaaaaataataataaagagacataacaggctctccatgatgtcccccatcacaggtgaacaaatccaccatcaaggctttagaggtccctagagcccctgctgtgaggggccaaggagctgacccatcatttgcagtcacccagaaggcccagaagggctctaaaggcactgggggccagaggagaacgacagggtcccccacgaaccctcgcaaacaagtcctccaccagccccactcacccgcccctgaagccaccagccccactcacccgcccccaaagccaccagccccactcacctgcccctgaagctaaacctagcagtctgaacggccagtcttggagccctggtgccgcagcagctttgtgactcaaagccaagttctggccaatccctggcagctcttagggggtggggattctagaaggcacagccagaggttggggaacaggatgcagggcagggccaaaggtcatggtggttgctacctacaccggctcatcctgagtacaaagggttctcagcacagagggaaccccaaatctccccctccatgtacctagaggcagtttcagtctttcatcccacgggcattttctgagcacctactatatgctggaatttgccccatgtctggggatacaaacaactcaaagaatttgaggctgtaaaatggctagatgggaagggaccaaaaagggggtgcaacgggccagtcagggttctcactgatgtcttgggtgtggctctgagactgcgggctccttggggtggggccggacttgatctcttgggatccccactgggcccggcaaaagtgggtactgaccctgagccgcagcgctataaggggaagtcaggctgctgtcctggatcacctcctggggctgggctggggcccagcatgagtcaccgctggctgggccaaggctgacacgcaccttggactcagtgcagctggctccagccaaagccagcctggcccagaagcctctgcctggcttccttggggagccgctgggggttgccgggacaagaaccagcaggggtgcctgacctccctctgcagcgatcaccccctccaaaaccttccctatactgtgggtgtgactttggacaaaatcagggacatggcagatggcagttgggtggggtttatatcctttgtctgttttttgagattgagtctcgctctgttgcccaggctggagtgcagtgctacgatctcagctcactgcaacctccacctccccgggttcaagcgattctcgtgcctcagcctcctgagtagctgggactacaggtgcatgctatgacgcccagctgatttatgtagttttagtagagataggatttcaccatgttggccaggctggtctcaaactcctgaccacaagtgatccgcctgctgcggcctcccaaagtgctgggattacaggcatgagccactgcacccagctcatcctttggatgtttcatcagaacaggtcccttctgtgctgtcaacgagctaaacacaaactgggagttctcagggcaattggagaccgtaggagcccagtaaggtgctggcctagcctgagggttactagggacaggcttccgaggactgtgcagctgaggctgggaggtggcgctcagctgcatgactgggggaagagtagctggcacagaactacagctgcagccgtgcaaagaccctgaggccaggaaggcaggatattgggaatttgggtggagaggctcctgaaaggagacactggccagcccagggactggtgcagtcaggactttttccaaaaaggtttcaagtaaggagtcagatctgtgatttagaaaaagcccttcacatcacagctcatgcctgcttgactcccccatcagactggagggctggcctcaactaggtgtcaataaatgctggggacgctgggcgcgatggttcatgcctataatcccagcactttgggaggccaaggcgggcagatcgattgagcccaggagtttgagaccagcctgaccaatatggcaaaacctcgtctctactaataatacaaaaattagtcaggcatgatggcaaatgcctgtaatcccagctactttggtggctgaggcaggagagtcacttgaacccaggaggtggaggctacagtgagccaagattgcaccactgcactccagcctgaatgagagaccctgactcaaaaaaaaaaaaaaaaaaaaaaaaaaaaaagaggccgagtacagtggctcaatacctgtagtcccagcattttgggagaccgaggttggaggatcacttgaacacaggagttcaaaaccagcctgggcaacatagatcccatctctacaaaaaaattatttaaaaattagtagggcggctgggcgtggtggctcacgcctgtaatcccagcactttgggaggccaaggctggcggatcatgaggtcaggtgatcgagatcaacctggctaacacggtgaaagcccatctctattaaaaacacaaaaaaattagccaggcatggtggcaggcgcctgtagtcccagctactcaggaggctgaggcaggagaatggcgtgaacctgggaggcggagcttgcaatgagccgagatggcgccactgcactccagcctgggcggcagagcaagactccgtctcaaagaaaaaataaaaataaaaattagtagggcatggtggcgtgcacctgtggtcccagctacttgggaggctgaggtgaggcaggacaatcagttgagcctaggaggtcaaggctgcagtgagctgtggtcttgccactgcactctggccaaggcaagagcgagacctcatcttgtaaagaaaaaaaaaaacaaacttgtggggcccagtggctcacgcctgtaatcccagcactttgggaagccaaggtgggtggatcacctgaggtcaggagttcgagaccagcctgggcaacatggtgaaaccctgtctctactaaaaatacaaaaaaaaatttagccaggcagggtggctcacgcctgtaatcccagaaactttgggaagctgaggcgggcagatcacgaggtcaggagatcgagaccatcctggctaacacggtgaaaccccgtctctactaaaaacacaaaaaaattagccgggcatagtggcgggcgcctgcagtcccagctactcaggaggctgaggcaggagaatggcatgaaccagggaggcagagcttgcagtgagctgagatcgcgccaccgcactccagcctgggagacagaacgagactccgtctcaaaaaaaaaaatttagctgggcatggtggcagacacctgtaatcccagctaatcaagaggctgaggcaagagaatcgattgaaactgggaggtggaggttgcggtaagccaagatcaggccattgcactccagcctgggcgacaagaggaagactcagtctcaaaaaaaaaaaagaaaaacaaagtacgtcctccacctctctgcagggctcctcagagtcctttcgccttagaccacttgggggcaggcaagcaagagacctgggtttgaatcgctgctctgccatttaacaggggtgttggccgggcacggtggctcacgcctgtaatcccagcacttcgggaggccgaggcgggcggatcatgaggtcaggggatcaagaccatcctggctaacacggtgaaaccccatctctactaaaagtacaaaaaattagccaggcgtggtggcgggcgcctgtattcccagctactcaggaggctgaggcaggagaatggcatgaacccaggaggcgaagcttgcagtgagccgagactgcgccactgcactccagcctgggagacagagcgagactctgtctcaaaaaaaaaaaaaaaaaaaaacaggggtgttgggcaagtctcaaaacctcccttccccttctctactaattgggggccacagtaggtaccatcattgagtgcggtcactgttgtccgtcccctgagcacctcccagttctgacttctgacctgagagatgttatgctggatgcaaacacccgcatctcacagcacaggatgtagaggccatcgggggaggaggactcgcctgagatctcacaaatgccaactggaacctaagctgggtcccggtctcccaaccagtgacactctgcccgagatgtggttcttggtctcttgtgtgtcaagacacccctgctctcccacctcagcctcagttcccttcagcaggttccttcaggccctgctgaaacgtctgcatgacctcccacaaggcaacgtgacagctaaaaaccaaaccctggccggacgtgggggctcacgcctgtaatcccagcactttgggaggccgaggcgggtggaccacttgaggtcaggagttccagaccagcttgaccaacatggtgaaaccctgtctctactacaaatacaaaaaagtagccgagcatggtgggcacctgtaatctgagctacttggaggctgaggcaggagaatcacttgagcccggggaggcagaggttgcagtgagcctagatggcgccactgcactccagtctgggtgacagagcgagactctgtctcaaacaaatgaaccccaacatagctgttggtggcaaggcctttctccatgaccaagggacggtggccattctctccaagtttcttcatctgtaaaatgggtacaattcagtggccctccctaacagggctggctaggtacacatggccaccagccctacttgctgtgtgacctcggccactaatgttcacatccctcagggtccccaatgagttggaagcccaaagcgcagggtcttaacagcaaagggcagagcaggcaggagaagcaggaagcctcgggtcaaagctctgaaagtgagggagtccaaggtcagactatctctgcacagtctccttaaaaggctgtgtgatgtcaagccagttgctcaacctctctgaaccttagatttcctcaaagtagggagtaggatgttgggaggaggaggagaagcgaacttcagggagatacttggaaaatcccagtcctggaggcagacctcttgggttagatcccacctgtgccaacttcctcctggtactgggtccatcagcttgtcctgggcctcagcatcccccgatccaccaaaagagaaaagcttacactgtaagccaagcactgctctgtaaacataaactctcttaatcgtcacaactttatggggcaagtttttcgactgttctccccattttatacggacaggcaaaccaaggaccaaaaggttaaaaagtttactaagtttctgtctcttccttcctgctttgggctggggctgtgccctttccacctcgaaatctctccttcccaaaaggcaagggggcattagctagttccaaacgcagatcaaagaccccaagacccctccccaacctggacatcagccggccccgcgccaaggcgcgtctagggggcgctcgctgcgcgccagatgtgcgggccgctctcagacacccgctctctgctccctccaacaaggggaggagctagggacagagggaggagagaaaggcgggggtgtaggggggaagcgaaccaggccccgcccagcccgccaggccccggcgggggaagaaggaggcggagagccgagctggcgtaacgagactttactgaaaacagaaaaccgggcgaaccaaggattacaaacaggaatgtggactcgtagcaaaacaaaacaaaacagaacaaaaaagggaggggggaccggtcgaaagaaccgaaggggggagcgagatcgaggaaaggggcggagaatttttttttcttcttcccatttctttaaaaaaccaacacaagaaaacacacacacacacaaccaacgtttgttcccgagtagaaacataaatagggcagaatcgaacactctgttcttctctcttccaaagaaaaaaaaaaaaaagtaaaagtaaaggaaaggcagggtttgaggctgcgccccctcggagcccccttccgcggcgcggtgtacaaaggggcagccgagacgcgcgggtttgtgcaacacggggcggccgcgcgggggaaagaggcagcgcgagggcgggggggtcatgcgctcgcccccccgggagcagggggtccagcttgtcgagtcctgggcaccctcggggggggggaatccccgggggccgcgccctctctgagttcctgggcacactcggggagggggggtccccagggccgcaccctctccaagtccggggcgcccacgacacccccccgcgagcccgccccttggggagggtggccgcgcatgcgccccgcgcgcggactcagtacgcgggcacctggtgctggggcagcagctggcagccgctgttgacgtggctgaggactttctgcttgagctgcgccacctgctcgcgcagcaggctcgccgtggacgccagctccgtgttctgactcttgagggtcttcactttctcttccaggcgcgagatgcgctccagcttgcgcttgcggcacttggaggcggcgatgcggttgcgcagccgcttgcgctccgccttgatgcgctcctgcgtgtccatgtcgatgggcgacaacggcgggctctcgccgaagctcggcacgtcgggcaccgtctgtggctcgtccttgagcgcagccaggcgcggcggccccaacgcgcctgggggtggcggcggcgggaagggcacaggttcggcagcgaaggcgaccgtcgcggcgccccccgcgcccccggcgccgcccgcgtagctgctcaggttcgcgtagacaggcgcttcgggcgcggccgccgccggggccagctcgccggggggcgcggagcccgtggccgtgcccgagggccccccggcggcggcggcggcggcggcagcggccgcgcccgcgccgagctggttctgcttgtgtaaatcctccagggccttgacgaagccctcggcgaactcctgctcctcgctggccgccaccttggggtagaggaactgtgagctcgtcggcgtggtggtgaccagcccgttggactggatgatgaggcgctcgagctcgggggaggccagcttcagcagccccaggtcgggagaggcgagcaggccgtcggggggtgccgcgctgggggcgccgtcggcgcgcaggggggtaggaggcggcgcggccgcaggcttgagcgctgccgccacctgctcactcaggctcagcgtcagcgcgtccttcttcatcatgctgccggccgcggccgtcgggggcgccccggggaacaagcggcccggggacgcgaagctgccgccgctgccactggcgccgccgcccaggccgctcagcgcctcatcgccgtagaagggtgtttccatcctccgcctcccccgccgcgccggcccgggggggagtggccgcggcctcccggggggcccgcgcccccccgtccgctcggccctgcgcccgccccggccgcggccgcagcgcccggccctccactggcggcggctcctgcgccgcgccacttgtgcgccctcttatagcctcggctcggcgcgatgagctcaccgcccccgttcgccattgggtgcgggtgacgtcgctcatttgcatggaggggcggggccaagccgccgacgcccgcccggccgccgttgccccggcgacgcgcggtaaacgccacaacagcgcgctgccttgtgggttgacgtcatgggggcggccgcgcgcccgggccgggtcaccccgccccgggaccgctgtgtacgaccgatctccccggcgccgcctccgccaaggcacgtcccgggtggcgtgatgggcccgggccaccaggcgcccgcccgccccgaggccccgccccgtgtccgcgcgtggggccccggccgggcgggggcgggggcgggggcggtgccggcctccggggactggagggggatggggtcccgcatggctaaataactccttggcgcctcctgctctgctgtgccgccagggcctcccctagcgcgccttctggagaggctttgtgcggatacggggctggaggcctggtggggctgtgtccgggggctcgccgggggtgtggggaggtctgcgttcctcaccctccctccttccttccctccctccctccaccccgcgtgtgattgctcaggaagagacgggaggggagaggagggtcgccagaagttgctgaaagcgcttggatcctgatcattttcactgagtgcgttctagaaccaggagtcctacttcctgcctttacagatgggaaactgggctcagagaggtggagtgaccatcccccgagagttagctaggagtcacagcagggcccgggctgtgactaggcctgagctcttgtccacccttagaaccctagaacctgggagtccaggcccctgcgcagccccttccttccgccgcccacgttttaaccccaggtctgccagggctgtgatgtcctgggcgagggtgcccaactccaggggctgggctgatgaggcaggaatgccgggtataattattacatgcttgttaccactatcatggctgttagggcttaatgagccactattaagactggctgggaagggggtgtgagggaggagagatggacccaccccaccaatactcacaagggatccttaggacatctggatctgacctacagcctctgcatgcacccctccagctccccacctctgtctgaatggagcccacaccctcctttccctgacctccttcccctcactctctctgatccttggcctcccagttgcaggactaatcgtacctctgggcctttgcacgtgctatgctctctgcttggtactcccttcccccagtgcaaagatgtgtcttcaggaagtgccccaccctcagactttactcctttattgtagcctctgaatctgccagaatgatggagtggaccatagtccctgaaggtcagggacattgcctatgctgagcctgctgacagggcctcgcatagaatggatgctcagtattaaaggtgaatgcggggctgggtgtggtggctcatgcctgtaatcccagcactttgggaggccgaggcaggcagatcacttgaggtcagcagttcaagaccagactggccgaaatacaaaaatacaaaaaaaaaaaaaaatacgaaaattaaccgggtgtggtggtgtgcacctgtaatcccagctactcaggaggctgagacatgagaatcgcttgaacccgggaggcagaggttgcagtgagctgagattgtgccactgcactccagcctgggagacagagtgagactccagtctcaaaaaaaaataaaaaataaaggtgaatgcaacaaaaggttgcttgtgtgggtggtctctagcctcagtttgtctgcctggccagtgggcatgcgttactccttttctatcctccttactcacctggctctgcccccaactggggcatgaaggccataagggaggctgtcctcatcaccaagagaggtggcctgtcggccacacgcggtgactcctgcctgtaatcccagcactttggaagtctgaggcaggcatttgaggtcaggagtttgagaccagcctgaccatcatggtgaaaccccatctctattgaaaataaaaattaggctgggcgcagaggctcacgcctgtcatcccagcactttaggaggccaaggcaggctgatcacgaggtcaggagatcaagaccatcctggttaacacggtgaaaccctgtctctactgaaaaataaaaaaaaaaattagccgggcatggtggcgggcgcctgtagtccccagctactcgggaggctgaggcaggagaatggcatgaacccgggaggcagagcttgcagtgagccgagatcacaccactacactccagcctgggcaacagagcgagactccgtctcaaaaaaaaaaaagaaaaaagaaaagaaaaaaaaattagccaggtgtggtggcaggtgcctgtaatcccagctagtcgggaggctgaggcaggagaatcgcttgaacccgggaggtggaggttgcagtgagccgagattgcgccattgcactccagcctgggctacagagtgagacactgtctcaaaaaaaaaaaagaagaaaaaaaaaataggctgggcgaggtggctcacacctgtaataagcactttgggaggctgaggcgggcaagtcatctgaggtcaggagttcgagaccagcctggccaatatggcaaaaccctgtctctactaaaaatacaaaaattagccaggcatggggagcgcaccggtaatcccagctgctctggagaaaggagaatcacttgaacccaggagatggaggttgcagtgagctgaaatcatgccactacactccagcctgggcaacagggcaagactccatcttaaaaataataataataataataataataataataataataataataaagacctggcctggcaggcctgggattcaaattgccagggcagggaactggaggtgtgggtttgttttgtctctagattggttaggaaggtgtctgtctgcctattggagtgtgtgtctgtgtgtgcacctgtgtctgtctgtattcgtgttgtatagacagacgcaggtacacacagatacatactcagatccatgggtctctgtgctctctagcccaggttctatcctggacaaagagatccctagtgggacaagatccagcccgcagacctgtagccagccctgccctgggaacccctctctgggtcccgtgcagtggggccagagtggaggagacggggtcatgcctctccctgaggcaggaggtgagtgggcggcctacagaggccctgccctgaacttgggcctcagccttggcagctggggagatggtctggtgaatggtaggctgagacagcctgagctgagtggagcactttcctgcaggcaggcaggtgagatacagaggcctgtcaacctctctgagcctcagcttttccttcatgaaaattgagcaaataaacctacctactttgtggagtatcgcgatttttttttttgaaatgaaaggcctcacatatttattactgaacccagccaacccacacgttcataacagattcagagaggaaaacacgtcgaactctccagatagtggtgacactttcagtttgatatgctaacgtgatcgtgaccttcagacagcataaatatgtgtgccatctcatgtgcaattccttatagacccagcttggttcttctccagtgtccttttggagttgtacctgattttatttccagttttcatccaaatccactggggaatgggacgattttgcttttgtttcttgtccaggaatcgcttaatcctgaaagtcttgtaggaagatatggcgagaagtggagtcaagaacacaccacgatggtgcagaaaggaaaagcattgcgatttttattggatttgaagaaatagtaaggggtcaggctgggtgtggtggcgcacgcctgtaatctcagcactttgggaggctgaggcaggtggatcacgaggtcaggcgttcgagaccagcctggccaacatagtgaaaccttgtctctactaaaaatacaaaaattctcccggtgtggtggcgcacgcctttagtcccagctacttgggaggctgaggcaggagaatcacttgaacccaggaggaggaggttgcagtgagccgagatcgcgccactgcactccagcctgggcaacagagtgagactccaactcaaaaaaaaaaaaaaaagaaagaaaaaacaaatagtaaggggtcaataaatgctttctatgattgtattatttgcccaaatgtaactgcagttctttggttttgagttctctcagcttggaatacccttacactcttggcgaactcctactcatccttcaaaacccaccaccttctccaagaaacccttcctgaccatgtcccctaggaccgtcgtcaatcctctccatctggctaagacctgtctgtcccttatctgtgtcttgttctgtctcctccatagaaggggaggggaggtcttcaggactggatggggaaggcctctcctggcccctaagtgtgggaagctgcctttgccacccccaagggctcctttcttcttttttttgagatggagtctcgctctgtcgcccaggctggagtgcagtggcttgatcttggctcactgcaaccttcccctcctgggttcaagcgattctcctgcctcagcctccctaaatagctgggattacaggcatgtgccaacacgcccggctaattttttgtatttttagtagagacggggtttcacgatgttggtcaggctggccttgagcctgacctcatgatctgcccgcctcagcctcccaaagtgctgggattacaggcttgagtcactgcgcctggcctccctttttctttctcttcgcattttctgttgctccacctcaatgccctttcctaccctctccttcctcctcccagccagagagccctctgggacaccccattcctgtccttccatttatcccagccctgacaccacagcagctgttggtccagctctgttttcccagagtgggggttcctccggggcagatctgaagccactttggacatatggggcggagggtgtctctaacgccatcagctagtcccatacaatgaactagagagaactttcattcattcaatccacatacactgattgagcccctactgtaagccaggggaaagggcacacatgaacaagaccaacatctgcacctttgtaggtccccacaccaagggagagccagaccggcgcagttttcaggagaatcaatggtgtccccgccatagatggtagtggagggggctgatattttagagtttgggtaatctgggaggggtggcccaggatgtaacaccaagtgacagacaagctggacttaattgccaattattgggggatcagagggttccggtaataggaacagccagttcaaaggccccggggcaggaaccagttggacacatttctagaaggtggggaggcaggtgggactggattgggaagccagtgagtgccaaaggaagagaaggggagtgccgaagcctccacctctgctcaggagggatttacccccaaggcaatgaaagttgcagatgaggttggggcaacactagggcttggtccgggactctgcattttcacctttatctcagcagcagctccacgagtggtgagggacgttatcccacttctcagggcagtgtctggagggggcgcgcgacgtgcccagagtcgtacaggccaggccagagagaaccctgccctccaagcagaagccgaacctgacgccccgcagccgccggggtttgaatcgctgcggctgtagtccttccccagcgcagagatttattgtttaaagcaacctgcaggccgggcacagtggctcagggcagtaatcccagcactttgggaggccaaggagggagggtcgcttgagcccaggagtttgagaccagcctgagcaatctagtgagacctcttctctacaaaaataaaaaagttcgctgggcatggtggtacacgcctgtggtcccagctacttgggagggtgaggtgggagaatcgcttgggcccgggtaagttgaggctgcagtttaatttttagtctttatttgaacacccagaaaccaaaaatcacgttgataaatcggaaagccccaaagaaaaccgagttaagcaggcagccgaaggggtgaggtggagccaggcactcacgaccccacagcggggaggtggggcttgtgaggaccctaatccagcgcttaggacccttaggctcgcagaggcgggacttgcagggaaagtgccccgactgccggacccccgcagggcggtcgggagtggggcgccagactcgggctgggggcgctgtctggcccgcacattcctgaggatcaagttacccgagaaggctgaggcctctctgttcccctcctgccaggcttccgccctctccaggagcaggaaccgcagtctgtccccagtccagcgcaggtgtctgcccagcctctcggaggggacccaggccctgccctctggactggcaccggatccctcctgcctcataaaaccattttacagatgaggaaactgaggcacagccccccttcagcattgatggaaccagattgaacctggctctgccagctttatgaccatttttactaactgggcaggcctagaagaatggttcagtcaagtgtttgttgattgactgaccatctagaatcagtctccaaagcctcttattatagcacaaggagaaaagaacttcccataccacttaccctcctaccccaccctaggacagacaggacccctgcacttatccagcatgcatttaatgtgcacttcctgtatgcccaggcctgggttaggccgtttcacaggtagatactggagaaccagagggtttggggatcagaaggtagtgaatttgctttctttagaccaacttcagaaattggtttgggccaggcaaaatggctcacccctgcaatcctagcactttgggaggccgaggcaggaggactgcttgaggccaagcattcaagaccaacctggccaacataacatgacgatacccccgtctccaaaaaaaaaaaaaaaaaaagaggccaggcaccgtaactcatgcctgcaatcccagcactttgggagtctgaggcgggcggatcatgaggtcaggagatcgagaccatcctggctaacacggtgaaaacctgtctctactaaaaatacaaaaaaaaaattagccaggcgtggtgggcaggtacctgtagtcccagctactggggaggctgaggcaggagaatggtgtgaacccgggaggcggagcttgcagtgagccaagatcgcaccactgaactccagcctgggtgacagagtgagactctgtctcaaaaaaaaaaaaaaaaaaaaaaaaaagataaattggtttgtagtctgagcagggtggctcatgcttataatcccagctctttgagaggcagagacaggaggatctcctgagcccagaagttcaagagcagcctgggcaacatagcaagaacccatctctacaaaaagatagaaaaattagctggttgggaggctgaggcgggcggatcacaaggtgaggagatcgagaccagcctggccaacatggtgaaaccccatctctactaaaaatagaaaaattagccgggtgtggtggcgcatgcctgtaatcccagctactcaggaggctgaggcaggagaatcgcttgaacctgggaggcagagattgcagtgagctgagatcgtgccactgcactccagcctgggcaacagagcgagaccctgtctcaaaaaaaaaaaaagctggtttggttttttgtttcttggttgttttgggccaaactcacataccatcattcatcgattcaaccatgcttttttttttttttttttttttggagacaaagtgtcactctgtctctgaggctggtgtgcagtggcacgttctcagctcactgcaatctctgcctcccaggttcaagcaattctagtgcctcagccaccagagtagctgggattacaggcacatgccaccacaccaactaatttttgtatttttagtagagatggggtttctccatgttgaccaggctggtcttgaactcctcacctcaagtgatccgcctgcctcaacctccaaaagttctgggattataggcatgagccactgcgcccgacgaccatgctctattgagtgcccgctgtgtgctgggcaggtgggttctcaccgcccagaggtgatgttctgggggactggaagcaaggtcattttagagaagcatgctgtaggttggtctcacgattttcctttaagttggcccccttttctgtttttacttcagtaaatacattttaaaagggaaccttcatgtcaccaccaagaatggaaaaccagtttctcttgctataaatagaaggaaaccaaaaaactatgaaatgagagcaaagtcaggcattcccacctcaggaacactcagggctggggctggacttcgaatgtctgagtcttatcaaaggcagggaagccccaagcagaagggcaggaggggccacagggacccacttggcagatgctccagtcccgtgggtcccagcacacagtaggtgcttgatgaatgtgtgttgatctgttaacatgcaacccattattgtaggtgcccccccccaccatgatgtgtgggttttgcctgcatccgaccacatactcgtggcttttccaggtactgagccatttccccgctgacagactgagggcagggtggtgcctgaatggggaggggtgggggaggtggcaggcagctgcctcttgggcaggggaccccacaggggcctctctggggaggcttcggtttggtttggtgacatgccaggatgcagctctgggcaaacgtttatttgcagccttggggctgtccccacccacggtcctgtgggcccctgacgtctgtccacactgagatgtgggcccctgtggcccgccgccctccctggctgtctgtggtgtgtgaatcaatgaatgagtgaatgagtaaaggaatgaatgcaataagtagcataatggatgagttcgtagaataatgaatggatgagtgaattaatgaatgagtggaagtattcatgctgccaagatgggaaacccattctccaggtattctttttttttttttttaagacacagtcttgctctgtcgcccaggctggagtgcaatggcactatctcggctcactgcagcctccacctcctgggttcaagtgattctcctgcctcagcctcctgagtagctgggattacaggcgtgcgccaccacgcccggctaatttttgtatttttgtagagacgggatttcaccatgttggccaggctggtctggaactcctgacctcaagtaatccgtccgcctcggcctcccagagtgctgggattacaggcgtgagccatctagatatgctttgtccccttttttcggatggacaaactgaggctgtcagccaagaaaggcttcagtatgtggaaggcagattcgaagccagttggccctgcacatcgtgggctgcatttctgcaccaagactgggggttcctggagcgagcttaggggtccggactggtgcagacggggcgctggacctggcccccagccagcggaagggatctgggccccagatggggagtagatggaactggaggcaaggcaggcggcagggggtgaagaggccgctgccccaggctgcggggatggggaggcaccggcagggtccgcgttgattcagaaaggaccccaaggaaggagcaactttgggggaccccaaagttgtctgagtggtatcaaaggccgtgcacatggggcccttaagcgctacagcaggggcaatagtggagagaccccacgccttcccgcctcccgctgcccccgcatccccttcctcccgcctcccgcctcccccctgctcctcgcctctcgctctcccggggaggaagtggcgagaatgcgggggtgggcaccctattctcacttcccctggggaagggcggggcctgcggggtcctctccgccgccgggagacggcatctccgcgtacaggggtgggggcggggagccctaggagctgggcaggcgctgctcagtccctggccaggtgacgtccgtaagtttcctggtcttcgatggttctcgaatgaaaaatggggggaaagacattgagttggaaacagcgagttgttggggagagaggaccccaccccgggccggtactagcagccagacacggacacgccctgccccggaggggtcagggccaggccgaagggagggaagtcgcagtaaacacagggttgggttggggcgggaggcgcattccaggcggagggaacggcgcgggcagaggcctggaggctggtggaggcctcctgcctcgcctagctgcggggtcctcagcgtgtggcccctcccctaatgggagggggggagaaaggatccggggggagaggtctcggagctgtcggcggcagtggaagagttaacttcccggggctgccggaccccgccgcgagctggcgggtggcgtcagcgccaacgtcagggcgaagtggtgccgcgtagacgcggacgcttcggccgcccggcccccaccccacgcggcgctggaggccgcggggatgggggcgggggcggtcggccctgcaagcaatttactgggctctgtgcagagagggaaattgaggcacgggaacggccgtggcctggctggtgctaagcccgctagcccgcgtcccacactaccgccccctcccagctcctccaggtcgccggacgacctggagctggtttgggcttgttttccattgcgcaaatacctgcgaataaacgtttgccccgagctgcgacttggcacatcaccacctctgcatggcctcagtttcctcaaccggataatggggagagttgacatttagtgtgggcgctgggttcggccttgaaaagggggtgtgggaggggactgcaccccaagaaagaggctggagcggggacacctgcgaggctgtctgtgaattccgggctggttctccagccccctcctctcctcccgtcgctcactcccctcctctccctccccttcctgcttcagcttcccctcccctcttccttatccccttctccctcccgtctcccccgatctcctctccaccccctctctccctttcccccgcccgcccagcgaggccgccccaccggactgctaattaaatgcagagctggggggaagggacggcgcgtggttaaccccttccccgccggggccctgaaccggggatggggaagggtgtccgccaccggaatttcctcccccccaggggcaggccttaagctctaggacaagcccatttattgagtgggtatatcgaggccaaaggaacggccccaacgttctgggtgaggctgtactaaatcgggcctcctgattggagggccagagcttcgagatagcggaagagaaaagcaatatcgtggcttggaaataaaccaagagaaaaaaaaatgagttggaaggagagacagcgggagagggaggctggaaaaaaatctaggagcaagacagagacagagagacaaccaggtaagggaggtggagctccgggtgtggcctggaggcacccaggcaggctcccggtaggaggcggcttcctggaggaacctgtggtggaataactcctggccctggtgttagcctccaggcctggctcacgcactgactgctgacttctgatagggccttgtggcctgaaaggaaggtcatgcctgcctttggagccatcggtcaacccaagtccccgccctgtccctgaaaacatcagagaggagcccagcgaagcgaagtgtgggctatgtgctgtgaggtgactcagtggcccctcattcttgggacgggaacaactgaaagaagtgaatgatataaagtcaggtggtgagaaagcaaatgacagcaggcggagggagtgtggggtggggggggccagaggatccatgataccagcagcagggccaccatgaggatgccccagggaagggtgttcctgaaagctggagtagcacgtgcaaaggccctggggaggaatttgaggtatttgtttgtttgttttttgagaggagtctccctctgtcccccaggctggagtacagtggtgcgatctcagctcactgcaacctccacctaccaggttcacgcgattcttctgcctcagcctcccgagtagctggaattacaggcgtgcgccacgatgcccagctaattttgtatttttagtagacagggtttcaccatattggccaggatggtctccacctcttgatctcgtgattcgtccgcctcagcctcctaaagtgttgggattacaggcgtaagccactgtacccgggctgaatttgaggtgtgttaagggaacatccaggaggaggcgtggcgcagggtgaggagagatggaggattacaggggcctccagatcctaagcagggagggtggggggtggcttgagtccttggccagcccaggtggagcctgtgactgctctccctgcctcacttttcctaccattatgcatgctccagaagcagcaggggaggctttggggatgtggaggttgcccagggtcacagggacccctgttgtgccctccgtcagtgcccctctggcctccccacaccctctgtggctccctgctgtggccagtcttccccatcatcgcccctggctctcttctctcctgcagtccagccactcagcccttgtacatgtccctcatctgttctcacaatgcccaccccaggtgacaacatcctcccaagcccccttcaggagatggtggggctgacactaacaggggagggggtgtagggaaggtgagcaccctggcccctgagtgctgcacacaaactgtgtaaaaatagctgctccccctgccccctgtgaggaggcggctgtgacggtggtggctgcagtgacggggatgtgcccagagaagcatccggcagggccagttgccatggtgatgctgactcagcggcagaggcaggtagcagcatctggtacccggccggcacgcctctgcttggcctacgctcatagcaccctgtccagccccaactttccagcctccaccctgggggtgtcttctgaggctgcagaggggtgggtgagacctcgggaaggactggacaagttcctccaccagacaccactcagtcatctgctggaaggtgggagacgctgcttctcatggagcggacctcagtgtcaggtcttcctccctctatcagccatccgcccatctacctactcacccatccatccactcatccaccatccactcatcccccatccatccaccatccacccatccatctaccatctgcccatctaccatccatccacccacctgtccatctatccacccatccaccatccactcatcccccatccatcatccaccaatcagtccatcatccacccatccatccaccatctacccattcatccatccatccattcctccacccagcggccatccatccatgcaccatctacccatccaccatctgcccatccaccatccatccatctacccaccatccatccatctacccacccacccatgcatccaccatccacccattcaccatccacccatccaccatccgtccaccgtccacccatccaccacctaaccatccaccagccatccatccacctgtctacccactgacccatccatccaccatccactcacccacccatccacccatccatccacccatccacctatctacccacccacccatgtatccaccatccacccattcaccatccacccatccatccaccatctacccatccaccatccatccaccatccacctaccatctacccatccaccatccatccaccatccactcatccatctaccatctacccatccaccatccatccaccatccactcatccatctaccatctacccatccaccatccatccatccatccacctatctacccaccaatccatccatccaccatccactcatccacccatccatccaccatccacccatccacctatctacccacccacccatccatccacccatccatccacccatccacctatccaccatccacccatccgtccaccatccacccttccatccaccaatccacctattcatccagccacccatccacttaccacacacccacccatccatccattcctgtgttcatccattcactcaacatttttggagcacttaccgtgtactgacatccttctgggcacatggtggttgccactgtcgatgcaggcagggtatcagcagtctggggtgcagggacttgggtgaggacaaggcctccttggctacttggagccaggccttgagatgctgaggccctatctcttccttgttctcctagtcttgctccctctctcttcctgcatctctcaatctctctgttttcccatctgagtccatcttagatccttccccatatccccaggccccccagcagctgccgtctattcccctcttcttctccccactcacttgttccatgccagctttcccttgggtacagctatgtattcccacctcggggtctttgcacatgctgttcccactgtctgggagactcactcacctggaattgatcatatttaattcttggctggctttctttctttctttctctctctctctctttttttttttgagatggagtctcactctgttgcccaggatggagtgcagtgacgcagtcacagctcactgccccctccatctcccgggttcaagcgattcacctgcctcagcgtcccgagtagctgggattacaggcacacggcaccacaccctgctaatttttgtatttttagtagaaacggggtttcaccatgttggccaggctggtcttgaactcctgacctcaggtgatctgcccaccttggcctcccaaagtgctctgggtttaccatatttaattcttgccttccttaatgtctgcctctatccccatccccagagtataaaggccaaagagctgacctgtggttctttcagggacctatttgtgccttcatatctccaactacgaaatgggtaaatggacatggtgctagcaggatgacctcataactggggcaggggttgggaggaagcccttagacctgtgcccactgcagattaaacactcagtaaactcccttccttggaaacagcccaaatgtccatcagctgatgaaggatcaacaaaatgtggtccacccacacaatggaatatgatgcagccacaaaaaggcatgaagcaggccgggcacagtggctcatgcctgtaatcccagcactttgggaggccgaggcgggcagatcatgaggtcgggagttcaagaccagcctggccaacatagtgaaaccccgtctctactaaaaatacaaaaattagctgggtgtggtggcacacatctgtagtcccagctactcagaaggctgaggcaggagaatcgcttgacccgggaggcagaggttgcagtgagctgagatcgcaccattgcactccagcatgggtgacagcataagacttaagactccatctccaaaaaaaaaggcatgaagcactagtctgtgctaccacgtgcacaaaactcgaaaacacgatgctgagtgagagaagccaggcatgaaaggccacacagtgtgagattccattgatatgaaatgtccaggacaggcaaatccacagagacaggaagcagcttcctggttgccaggggcttgggggaagggaatggggagtaactgctgatggggaccaggtctcctttggaagggatgaacatgttctagaattagaggcgatggttgcacaacagtgtgtgtgtattaaatgcccctgaattatacactttaaagtggttcattttatgttatgtgactcctgccttactttattttaattttttgagacagggtttcactctcttgcccaggctggagtgcagtggcatgatcttggctcactgcaacctccgcctcctgggatcaagcagttctcctgcctcagcctcccaagtagctgagattacaggtgtgcaccaccacaaccagctgatttttgtattttagtagagacgtggtttcaccaggctggtcttgaactcctggcctcaagccatatgcccacctcagcctcccaaagtcatggctcccatgagccaccgcgcctggccttcaatttattttttagagacaaggtcttcctctgtcgttcaggcagaggtcaaaccgtgcagtggttcaatcttggttcactgcagcctggtctccagggctcaaccaatcctcccacctcagcctcctgagcagctggtacttacaggggccacgccaccatgccaggccaattttgtttattttttgtagagatgaggtttcactatgttgcctaggctgctctcgaatccactttcctggattcaagcgatcctcctgccttggcctcccaaagttctgggattataggcgtgagccaccaccatgccaggcacctcaatttttttttttttttttttttggagacagagtttcactctttttgcccaggctggagtgcaatcgtgcgatctccgctcactgcaacctctgcctcctgggttcaagcaattcttcttcctcagactcctgagtagctgagattacaggtatgtgccaccacacctggctaattttgtatttttaatagagacggggtttctccatgttggtcaggctggtctggtctcgaactcctgactgcaggtgatccgccggcctcggcctcccaaagtgctgggattataggcgtgagccaccgcacccaaccacctcagttttttttgttaagtacagtacattaggtaaaaacgaaggaaatctgaataaagtagggaatttagtcattacaaacaaaacaaaactgcttcttaagtggttcagggaggttggttctctgaaggtgtctctaggttgactcatcctctctaagggaaaacagagggccagggaggccctcacatctacagtgtgccagcccttgcccggtacccttacccttgctttttgtttttttttgagatggagtttcacgttgtcactcaggctagtgtgcagtgccatgatctcggctgactgcaacctctgcttcctgggttcaagtgattctactgcctcagcctcccaagtagcttggactacaggcatacacagccacgcccggctaatttttgtatttttagtagagacggggtttcgccatgttgtggccaggctggactcgaactcctgacctcaggtgatccgcctgcctcggcctctcaaagtgctgagattacaggcgtgagccactgtgccctgctccctcgccctcactttgctcgccagccagctgactgccttttcaacacacccagcacacactttcttcagtgccttgacacctgccattctctctaattggaagcctcaggtgatcgagaaacgctggattccaccccagcaggtggaaccgaggtacagttctgtgtgctctgttatccccaccttccttaggccaccagaaaggtcaaggtgcttggtggttaggacaaagttgaccgcaccttggggccacagaggccgttgaatatgaccagggaggctgacagcctgagatgacagcagggtgtgagggtatcttggagggcacagtgcacacccctctcccaccctgggagggagaggaccctataagttaagtggggtctcgaagccagtgggagggtgaggaggtggaattcagaccagctgggggctctgtcaaaagggcctgcttctggctgcctcaacaatgcaaacggcaagaactttttttttttggtggggggggggtcttgctttgtcacccaggctggagtgcagtggcgcaatcatggctcactgtagcctcaacctccctactcaagtgatcctcccccttcagcctcctcagcagctgggactacaggtgtgtaccgccgtgcttggctaatttcatttgttttgtagaggtagggtctcactatgttgcccagactgggatcctgggctccagccatccgcccgccttggcgtcccaaagtattgggattacaggcttgagctactgtgcccggccaagaaccatttttaaatctaattaatttttttttttttgagatgaagttttgctcttcttacccaggctggagtgcagtggcgagatctcagctcactgcaacctctgcctcccgggttaaagcaattctcgtgcctcagcctcctgagtagctgggattacaggtgcctgccaccacacccggttaatttttttgtttgtttgttttggtttttttgagacagagtctcactctgttgccaggctggagtgcagtggtgtgacctcggctcattgcaacctctgcctcccgggttcaagcaattcttctgcctcagcctcccgagtagctgggactacaggtgtgtgccaccaggcctggctaatttttgtatttttagtagagacggggtttcaccatgttagccaggatggtctccatctcttgacttcatgatccgcccgcctcggcctcccaaagtgctgggattacaggtgtgagccaccacgcccggccaatttttatattttttagtagagacggggtttcaccatgtttcccaggctggtgtcaaactcctgacttcaggtggtccacccacctcagcctcccaaagtgctgggattacaggcataagccactgcacctggcccatttttttaatttttaattttttttcccaagacagtcttgctctgtcacccaggctggagtgcagtggcatgatctcggctcactgcaacccccacctcccaggttaaagcaattctcctgcctcagcctcccgagtagatgggattactggcgctcaccaccatgcccgcctaatttctgtatttttagtagagactgggtttcaccgtgttagccaggctggtcttgaactcctgacctcgtgatccgcccgcctcagcctcccaaagtgctgggattacaggtgtgagccaccacccccagccatttttttaatgtttaaggaaaactgctgggcagtgaaggtctccccagacaatgtcactgagccccggcctccccaacctggtctgagatttcagggggtttcagaagaagctgacctttgagaaggctctggggccaggatgtctgagttacttgatgctggaggggtggggcaaggagggtctggccctggtggtgcagaggaggggagatgagggtggggaagacacttgaggacgtgaggagtatttttaggtgctgaatgcagccctgaaatatttccacggccactcccgagagcgagctgggtgactatttcggtgcctggttccagtggaggcggggcaggggtgagtcactcactgcccagtggccgcagaggccaggcccaggctgggaggcggctcgaagggcaggatcgcaggcctgcaaggtgaacggtcactggcctggggccaggcttcctaagccagcctccagggcacagaggacagcggcctttctattccccatggcactggccaatccagaggggccactgcctgggtgccctgggacaatgagctgctcacgccaaccccatagttgtaaagatggagggtcccccgtgaggttctggacaccccacaggtgctaggcgagatgccatcttagattatttcaagcatttattgagcacttgctgtataccaggccagtcctaaaatgattactggcatcctcccttcatgcaatctgcccaataacccccatgaggtagagctgctgttatccccccgaccagggaggaaactgaggcacggtagggttaagccctccaggcacctaactatgtgcctcaaatcctgtccctcagctgatgttacaatcaggggagtgagttttaaagcagcagccgatcttgcttaccccccacaccctattcccaaccaattttggggtcctgactgtgcctgagctgggagaaggtcaatggatccttcaggtttaaggaggcagtggaaagaggaggtcaccattgctgtgtgacctggggcaggttcctcaccctctctgtgcctgagcagtgaatgacgatgccaccctatgggtgagttccggagctgcctggcacacattcatgatagataaacaatggttggctgagcatactggctcaggcctgtaatcccagcactttgggaggctaaggtgggaggatcgtttgagcctaggagtttgagaccagcctggacaacatggtgagacccctatctgtaaaaaaaataaaaaacaattatcggctgttgcttggattgtgtgcctgtcctgagccttcatttctccatctgtgaggaccctcggaggtgctgggttggaagtggctttggaaacccacggggctgagcggcaaggctgagtgggagctcggggaatcctcgccctcactcgaagtctccttgagaagaggctgatgcttggccgggcgagatggcttacgcctgtaatcccagcactttgggaggccgaggcgggcggattgcccgaggtcaggagttcgagaccagcctagccaacatggcgaaatcctgtctctactaaaaaatgcaaaaattagctgggcgtggtggcggacgcctgtaatcccagctattcgggaggctgaggcaggagaattgcttgaacctgagagacagaggtttcagtaagtggagatcgcgccactgccctccggccagggcgacagagtgagactttgtctcaaaaaaaaaaaaaaaaaaaagaagtggctgatgccaagcgtcaggaacagatccctgcaagtgcccaccccagctcctgtaggggcttcttttttattttattttattttattttttcttttgagacggagtcttgctctgtcgcccaggctggagtgcagtggcgtgatctccgatcactgcaagctccgcctccctggttcgcggcattctcctgcctcagcctcccaagtagctgggaccacaggcgcccacccgccttgccttcccaaagtgctgggattacaggcatgagccaccgcgcccggccctgtaggggcttctggcctgagccctgaccccctctgccccttccccacagaagttcagaggctccgtgcttgcagttcctccacctgttccggctctctctgtgtggccagcagcttcttgtccactcgagacttggtttgactggacctcctcttaaatttttaaaaaatttttaatttattattagtagtatcatttttttgagacagactctcgttctgtcgcccaggctggagtgcagtggcgctatcttggctcactgcaacctctgcctcctgggtttaagcaattctcctgcctcagcctcctgagtagctgggattacaggcaccacgtgccaccacacctggctaatttttgtattcttagtagaaataaggtttcacctcgttggccaggctggtctcaaactcctggcctcaggtgatccgcctgcctcgacctcccaaagtgttggaattacagttgccgctgtgagccacagcacccagccggcctcctcttgctctgtggaaaggaggtgccacctcggggtcctgcacttcctgggcaaggccagctggtcagcctaggccctggcagcctcctcctccctgccctgaggccccagcactgcccccttcctgcttccacccctgcttctgactgttccagaaccctctgtggctgcttctcatgtcactcagggcccacatcctccccatttcctgcccttctgtttgctcctgtgtcccctgggcacagggcctttgcacgggactgtcctcctgacccctgctggtccagaatgttctttcccaaggtggctggctccctcgtctctcaggcccttcctgaatcttcagtgtccttctctcaccttccctgaccacctcttcattcacctcctcacgagcccgccctgtttctggtttctttttcttttttttgagagtctcgatctgtcgcccaggctggagtgcagtggcgcgatctcagctcactgcaacctccgcctcccaggttcaagcgattctcctgcctcagccttctgagtagctgggattacaggtttgtgccatcacgtccggctaatttttgtatttttaatagagatggggtttcaccatgatggccaggttttgaactccttatctcaggtgatccgcccacttcggcctcccaaagtgctggggttacaggcatgagccactgcgcctggcctggtttcttctttttacagcatttatgcatttgatatgcatatgcttgtggctggctcactcctgtggaagggaaggattgccggggctgtgtcaccagcacctgggacaaggcaagtggccctagtgccaggctcgtgccaggccctgggctccaaaagaagaaggtggggagggaggtgacagggacacaggccatctgggggtggctgtcagagtagtgctgggaacagcaggtgaagcccagaggaggagaggaggaggagagagaggagggggatgggggatgggagtgggggatgagtggaggaggatggaggaggaggggaatggggaggaagatggggagtgagaggagggggatgggggaggagaaggagaaggaggaggaggaggaggagagagggatggcttcccacagctgcctctcgggggccactgcccaaggccagcctctgcacttttgtccctgaagcgggtgtttggctccaggatgaggtggcgtcagcagccgacccgggcctgtcgcactctggcgggggactgtgggctggccctgcagagctcagcccccggctgagtcacagcacagcgccaggcgtgggcctccctaacagaaagcaaactccaggcgagaaggtctgggggcgggtggggaccatctacgataaaggcagccccagttgggtgaggagggcacagaccatcggagggacagaaagacctggaagccttggatttaggaactagactggtgcttttggtttcttttcttgttgagggggctgaggatgaggctttgtgaaaccaaccaggaagaatgaaacacagagctggtccgacacccagctcgagggaggggggccggaagcttctggaagttggctgcccctaagcaggggccactctagcccacaaggccaagttggcagaggcagacgaggggactctgcggctcaagtcacgggccaggagcccgcagctgccgggctggaaaggtcagagccggctctgcgtctggctgcgccggcaagaagccacaattacgcaggcaaaagagcccggggattagccccagcacctgggaccctgaatggtgagaaggcacctagggggtgttggaacacattctgagttcagagcctggtcagggagaaaaaaccaaacggagatcaggaaggggaaggggccttcgagggctttcccatcccaacttcccaggatgcctgaccccagagctcctggatttgatccacgcctcgtgacacacacaacccctgggaggaaggagcccaggccccttggagagccccagaggcctctaagggccggtgagtctaggacatggggcaggagctgcaaatggggcctccctgctccccacccttccttccctcctcctctaaacattgccccacccacctcgccctgtgagcccagccccctgcacggcccacactgtaggggcatggggtgtgccaagagatgctcctgtcgaccaggcgcagtggctcatgcctgtaatcccagcactttgggaggccaaggcgggaggatcacttgagatcaggagttcaagaccagcctcgccaacatggtggaactgtgtctgtactaaaaatacaaaaattagccgtctgtgttggtgcacacctgtaatcccagctactcaggaggctaaggcaagagaatcgcttgaacacacgaggcagaggttgcagtgagccaagattgtgccactgcactccagcctgggcaacagagcgagactccgtctcaaaaaaaaaaaaaaaatgctcttgtccaacaggcaggtgggtgccgtgggccggtgcatcccaaggcttccaggcccgggcccccaactgctgcccctgcctgtgttgagggggcgggtttgtgaggttcagggcaggccacatcctggaccccacatgccccatctctaaccatcaatcaagtgccgctgtggcggagaggattcaggcgactgcagatatccatccctgtcccccaccccacacacaaggagaacatcccaggcgaggacattgtaaatgcaaaatctatacgatggcaagtaactctgaagactcaagaaaaagagttcctcacggacgggaccttttattccaatcacctctcaaaataggtctccgaacgaggaccctgaagagaaggctatgcagggggacgggccgctgcctggctcagggcttccctctggtttcttcacggtccacagatgctacccggagcctttctcgaaagcgctgactcagtgtctcaggtgcgcgcccgaggagtggcaaacccggcctggctcagaaagggggcaggagcctcgtgagaatcttccatgagcatcttccgaggggattcctgtcctgtcttctctgtgtgaacgccagtgtggacagatgaggatagatgatggagtccaggccacccaggagggggtgatggggaccatgcgtggcccctgcctgggacttccctccccacacaccccttggcattaacgtctccacagaggggagagggttataggacaacctggtgtggggggcgccggggactctcaagagcccccactgtccagatgctggtcttgccttttgtaaaaggacatcagtgcctcactgtgccgctgacacctggtgagaactctcaaaaggaagcttcccttacgggaacggggatttcctgagagtccagcgatggacagagggcaggagacccgctaggtgcacccagaagctcaaaaggaacagtggatgtgcagtgtgtagttttatttgtttttatttccataacacaagagaggaagcgaagggccagggcccgaggcatcccctgcacggttcgaaggctttcaaccgtcccgggtttgttttgaaggcaattttggggccgcgcccaaggaaaccctgcaggctgtcagtcccagcatgaacagcttaaaataaaaatctcccgtctggttgctgctcggagaggctccaagaaatgcaaaacaaacccgcctggaaaatgctgccctgagaaccagagcgagggcttgaaagatgccttcaacacagactcttctaggaatccagccagttttgggacggccgtttcacaaaaccaaaaaacaccaagtaacatttctaaccggagaattgccggttttagcaagaaaaaggggcttcacctaaaagggagggtcacaaaacacgaagggggttccccctggcgcctgcctcttcctttctgagcagatccgtccgagactgtggagcggaatcgccaccctggcaggagggggcgcagcagccggtctgggtgggcgctcactgtttgcccgcctgtctgccaggcttcttctctggctggcctctgcctgtgcccgggatcccacctcggccccggccaccaaacacacctagaggacagagagagggcgctgcagcagagccaggtgggtgggaccttcgacaggatcccggcgccctgaaactctaggccaggtcacctaagtctccagcctcagcttcctcatgtgtgaggtggtgactgagggtgcttggatctcctccgtggggcagagcatctgaggaaggcaggaactccagggcatcctcattatgggactagacccagcccccagggatgcgggggggggggactaggcgacagaggacactaagtcacattgggggttggggcaggcttcctaaaggacaaagccagaagggtttcctggaggaggaggaggaggtaggagaggcgtggagcagagaccagggcagtaggccaggctgggggctccctggcggggggggggcctcctatgcgccacaaccacccacagcccctcatctacctgccaggaggaaaacagaaagagggatttctgtgtatccagccccagggatggggaaggggaggggactccccagcaggcctgaggccagagatagaccatgaggacaaatgacattttccatgaagcccctgaggtgggagcatgtggccactggggaggtgacagggggttcccgggagatgagggccccagggactgagtggacgctacagcggcacctccagtaatcctgagcaggctgcacgcagggcacgcctgtccccacaccctctgtgtgcctggcgccccttcacgccaccctcaccacaggccaggcctggacgcagcaggttggtcaggccgggacccaacattgatccctccctctctgtctcccttggggaccccagctctgtaagccccgtttagggagccgtttcagagaactttctagctggacgaacgcttgaggaaatcaaagctggagcttcaaacagcaggagagccaaggccagcaagaggagctggccctgtggcccatgtgctgggtgccaggggccagaggccagcgctgcaggcagcatagctcaggccctccacagagcccgctgggaggctcagtcgtgggccagggaggtctggggacaggaggactgaccccaacaggaactggaatcacggtctactctgcagacctcaaccccgtgaaggtggggtcaggggtccagattcagaggatctaagaggtcagggctctcaccagccaggggccaccaggccctgtggggacagaggccagaggccaacgctggcctgggccaccaacctcccctctcaccaggcaggaccagctgtgctagggtgcacagcctggtgggggttactgcgaggctgctatctgcactccatggcccagtggcttcctgcagagcagccagagaaaaccccccacttccctaggtaggacccgacccactctctcaacaaccttgaccccaactactgggaaggagccaggccggggaccccagaggccccacccaccctgagatccccaaagctccctgcctggagtactatccctgcccctccctcgggctcactcctgaccacctcgtgagcctgcacagaattggcgcctggggccttccgggggcagccatgccgtgctgcaagcccccaggctggcacctgagcccagcacacaggcagtgcccatggatggcagaagcaaagcccaggtccccccgagaacacagagctggggacagagaggtgaggaagggcaggggctacagatggcccctgggcctaacaaatggaattttatgccaattcatcatctccggtgggggcgggcgaccttggctctggatagagccacgccaggttccaagtggagttgccagcggcctggacagatgggcaccaccataccctctcagaggggaaactgaggcttggggaggtgacttgatgtgccctgaggaccgccaggaggcgcagtgagaggagggctgagtcccaggtctcggggctcctctgcctgggcctcggctcatggccaaggaccaggaggggggcccgggagggttgggaggctccgaggcagcgctgcaagggcaaccccaagaaggagggatgccacgtgtggctgtcttcccgccccaggtacgtccactggagaggggagacccacctcggccagcgccgcccatgccgcggcctttctgctgcttctgctgctgcaggcctccgcggccgcggcccttggccaccacctcctccttgaccatgtcgatgatctcgtcggggatgcgcaggtacttgatggtgctgccgcggatgtagcactcgggcatccgccagaacttgtccccgtcctgcggagaaggggagcaggttattaacttaccaccgggccgtctggcccagccctgggagcgcgggaggccctgcagatcctgcccagcctgcaccccgtaccacccctgcaagctgcacagtatcagtcccgggacatacgtggcaaagggtccaccctgcaggcaggatctgtcctgaccccaggcaatccttcacccaggagcaagggtgggtgtggtaggcgcagcccccattgtgcactcacaaggaagactggctcctatcctctgcccgtgggcctggctcaggagtggctgactggggctccctccagcctgggatggggctctctctggttggggttcttcacctgcagcccaaagcccagagcgggtgggggcctccctgtgcaccagacacagccgaagcccagctactcctcctcctgccccagccccacctcacttctggaagcctctctacatgccctgactcattcattcatctaagtatctcctgacagggcctgcgctgggtgcagggacatgcgagcaagctacaggcctagtgtggtgggtgaagaggggcgggaaatggggggacttgggtcctgccagggtggctcaagggcggctcccagcgatgccagttttaggagagctaaccaagactggagaaatgggggccttgcaaagacacagactcatgctgcaatgcctccgaggcccccactgggacagatcgagggattagcaggggccagggccattcctaccatatcagtttcccagccccgccccaccgcccaggttcctggacagacccacgcacgacgcctggatggcctttgcccccgatgccctttaaagtcagatcacagtatgttccagcttggaacccacccagggccccctccagcctgggggcaaggtctaagaacctcagcagggctctctagggcccgagatcctgccccgccctggcggtcctctcccagcccgacgacactccctccagatggaactttctgtttccggaacacacgccatgggcttgcccccagaactttgcacgtggttttcccacttctcatctggctaactttgaccccaaaaggccttacctgcccgaatccccaagtcctcctgtcagacactctcctccacacctgggtaggtgtggcctggcctagcgctgggcggggaggaacagcccctttgggtgctcactctcccaggaacccctcgagggctcgtggggcggacacaccatggttctgtggggactcagggcctgggcaggtgacttggcgcccagctctcccaggcagggcccagaggcttcctcgtgcaggaacctgggcagggcctgagctcactgcagggaggcccctgcctcctgcccacagcgctccagaggtctctcagcccggggtctctgcatcctgcggcctgcctctgagggagggagggccccacttagatggggacgatgtgagttcccatcgcctctcctcccagccacatgtgacggcagcatcaccgcctggccacagaggcaggctgctcagggaaagccatccgtccactcgaagctggaggcagaggccaaaccaacccctggagaccacgcagcctctgaatcaacaggcttctcatgtctaggacctggaggtgtccacaagaccgcacatgctcacgcacgcaacacgcctggtgattccaataccggaagtggacagagccccgctggccgcagatgggaggcacgcggttctgcaccaaggcaccatccgacacagccagactggacccacccagacgccctccgacaggctatggcacgaaacccagcaagcagtttctagagcttctagcgctgctgcacagcagcctcaccacctgtccccaccccgcccagccctgtgctgatgagaggcccagtcccgggtgggggtggcggtcagggcaagatacggccacttcaggaagaagcgcctcccccctcgagccctgttgtcctgtcaaggtgaccccaggcaggcactccaagctccccagcagtttcctccctataccatggggggctgtcacccacagggagacaagacagatggggtcagggaaggttggtgggaggagtccaagggagccgctgccttcagcaccatccctggcctcctcctcagtgctctgtgggtcatcccaggggcagggaaggcccgtgacaccaggggaaccatcttccagccccggccgacccagcagcactcctagccaggcacttccggtcttgggctctggctggtggctcctgacccaccgggccctggcgctgctcctgcccaccgtgacctgggcatcccggacatcccagggccacactaccatggcccgcagagtgcaggcaacatccaggctggactaaaggcagcagagtccgggagtcttgggcctcccctggagggggctgccccagcctgagccacagggagtccccagtcctaggtccttccaggtcaggggtggcaccaacagacacacagcaggaaagtctcccacagggtcaaagtccagggcacactgggagacttggtggcctagctcaccctgccctgtccctcctgactgacccctggaaggacgagcagtcctaggcggcctcccccactgactcctcccatgaggcccagggagggagggaggaggctgagtgtgcaccccctgcatcccacccccgttggtgggtgcagcacccaccctggacgtgcagatgacttctcgcaggttaatgttcatccagttgtcgcagctcaccaggtgtccattgtacgtctccccatttttcagctccaccaactagaagagagacaggctagaggttggctgtagccctggagccctgcgccatgggcccctcaggaggtgtagctctgccctgagatggaccaccacctccgggcctcagcccacagttcccagacccctaaatggccttccttacaggcgacaggctctgcctccgctagacacttcgctggcagttagacagtctatcatgacgccaacctttgtgcaattaaaaaatgatactgggccgggcgcggtggctcacgcctgtaatcccagcactttgggaggccgaggcaggcagatcacgaggtcaaaagattgagaccatcctgaccaacatggtgaaaccccatctctactaaaatcataaaaattagctgggcatggtggtgcatgcctgtagtcccagctactcgggagcctgaggcaggagaactgtttgaacccaggaggcggaggttgcagtgagttgagatagggggaggttgcagtgagctgagatcgcaccactgcactccagcctgagcaacagagtgccacttggtcttaaaaaaacaaaaaactaagaaacacagaaatgtttaaaggaataagtgagacaatggtgatggtggccactgatccagggtggctgggggccaggtgggcacagctgggctggtcctggcaggcacccccacaacaccagatatttgggcttcagtgttccacaaatgctgttttttactgcaataattactcatctattttggtatgttttgagaacaaagataagtagcagatcattctgaggatatgctgctgttaggaaaagactgatattttttggtgtcttttatgagacagggtcttgctctgttgcccaggctggagtgcagtatcgtgatcatggctcactacagcctcaacctcctgggctcaagccatcctcccacctcagtttccctagtagctgagactataagcgcacactaccacatgtggttaatttcttttccttttgtagaagtggggtctcactgttgcccagactggtcccaaactcctgggctcaagtgatcctcctgtcttggcctcccggggtgctgggattataggcattagccaccacactcagtccaagcctgagattttcttttgagatggaagtttctctgttgttgctcagactggagtgcaatggtgtgatctcagctcactgcaacttctgcctcccgggttcaagtgattctcctgcctcaacctcccaagtagctgggattacaggcgcctgccatcacgcccagctaattttttagtagagacggggatttcaccatgttggccaggctggtcttgaactcctgacctcaggtgatccacccgccttggcctcccaccagggctgagatttttaaatgactcaacttaggcatctgcccaagagaaatgaacacaggcaaccatacaaaaatgtgtgcgtgaatgttcacagtgacactgttcgcaatagccaaaaaggggaaagagcccagatgcctatcagcagacaaacacataaacaaaatgtaggccgggcgtgagcctgtaatcccagcactttgggaggccgaggcgggcggatcacgaggtcatgagatcgagaccatcctggctaacacagtgaaaccccgtctctactaaaaaaaaaatacaaaaaaaattagccaggcgtggtggcgtgtacctgtagtcccagctcctcaggaggctgaggcaggaaaatggcgtgaaaccaggaggcggagcttgcagtgagcccagatcactccaggctgggcgacagagctagactccctctcaaaaaaaaaaaagtggtaagtatccgctccacggagtatcgtctggctataaggaatgaggcactgacacaggccacagggtggatgaacctcaaaaacacgttgctgagtgacaaccaccaggctcgaaaggcctcatggtctccgttcgcatgcatgggaaatatccggaataggcaaccccacagagacggcagctgcctcatgctcatcagggactggggctgggaagtgactgctgatggaaatgggctttccttttgtggagacggaaatgttccggcctagataaaggtggtggttacacaacctgtgactgcaccaaatgccactaaattgtgcactttaactgaagtgttagtatgtaatattatccttttttttttgagatggagtctcgctctgtcacccaggctggagtgcagtggcgcgatctcagctcactgcaagctccgcctcccgggttcacgccattctcctgcctctgccttccaagtagctgggactgcaggtgcccgccatcacgcccggctaatttttttgtatttttagtagagacggggtttcaccgtgttagccaggatggtctcgatctcctgatctgcccgcctcggcctcccaaagtgctgggattacaggcatagagccaccacgcccggccaatattatcattttttggagacagggtttcactgtcacccagcgacctgcaacctcaaacgcctcaggctcaggtgatcctcctgccttaggctcccaactaactggaactacaggtgcacgccactacacccagctaatttttatattttatggagagacgtggtttctccatgttgcctagactggtctctgaactcctgggctgaagccatcctctagcctcagcctcccaaagtgctggaattataggcctgagccaccatgcccaacctgaagttctttttatttttttaagtgacagggtcttgctatattgcccaggttggatttgaactcctgggctcaagtgatccttccacctcattaattttctttttctagagacaaggtttcactctgtcgctcagactggagcgcagtggtatgatcatagctcactgcagcctcaaactcctgggatcagtcgatcctcttgcctcagtctcctgagtagctgtgactataggcacacaccacctcatctggctaattttaagtttttcttcttgcccaggctgatctcgaactcctgagctcaagcgatcctcctgtcttggcctcccaaagtgctgggattacaggcgcgagccactgcaactggcccattaaatttttagtaagtatgtatgtattactcttacaagcagcagaaatgacaggagtgtggacactcctggggagggagaagagagcaaactgccatgctggtggacaggcaggccaggaagccgtctgctcagccaccgcccctgtgctgaggctggccccctctcaaacaggctttcccagaccactgagtactcaccatggggtgattctgagccgtcttcagcagtgacaagggaagctgaaaggcaaataaagccacatgatttgtctgtttgaccagcgcctgggagctctggtcttgagtcccacccatgactcatagatggtgcggtgcggttgagggggcacaggagtgcgtgtcaatcaccccccactggaaatgccatttcctcactctgcccagccctggaacacacacctgcctctcagattaggaagaaaagcctcacacaccctccctactcccgtaggtggccaccacctgctcttggtgctgaacactctggtcaattttttttttttttttttttttgagacggagtctcgctctgtcacccaggctggagtgcagtggcatgatcatggctcactgcaacctccacctcccgtgttcaagcctcacaagcagcttgcctcagcctcccaagcagctggggacaacaggcatgcgtcaccacacccagcaaatttttgtatttttaataaaggcggggtttcaccatgttggccaggctagtcgcaaactccagacctcaggtgatccacccgcctcggcttcccaaagtgctgggattacaggcatgagccaccgtgcctgccctaatgcttgtattttaagctcaaactggtatctctgagatgcatccatgttgatgaggttactctgagtatggagttgaggacactacagcttggaaacccgaggaacttgcccagtactatggcgctaggaggagacagagctggcctggtcctgtctgtctgaagcaagcacaagaccatgccttgcagggcagccccaactggcccaagactgacactgccaggccccaatgcaggggtcaatcccatcagagaaggccacatctgagctggttttatttttatttttttagatgaagccttgctctaaaaatacaaaactttgctgggcacggtggtgcgcatctgtagtcccagctacttgggtgctgaggcaggaggattgcttgagcctgggaagcaagcctgtcacccaggctggagtgcagtggtgtgatcttggctcactgcaacttccacctcccgggttcaagtgatcctcccgcctcagcctcccaaatagctgggattattaggggtgcaccaccatgcccagctaatttttgtacttttagtagagatggggtttctccatgttggccaggctggtcttgaactcctgacctcaaatgatctgcttgcctggtcctcccaaagggctggggtaacagcattgagccatcaccccccgcctgaactgggttttctttttttttttttttgagacggagtctcgctctgtcgcccaggctggagtgtagtggtgcaatctcggcttactacaagctccgcctcccgggttcatgccattctcctgcctcagcctcccgagtagctgggactacaggcgcccaccaccatgcccggctaatttttttttatttttatttttgtatttttagtagagacagggtttcaccgtgttagccaggatggtctcgatctcctgaccccgtgatccgcctgccttggcctctcaaagtgctgggattacaggcgtgagccaccgcacccggccctgaactgggttttcaaagacaggaagtcaccaggtaaggtgaactttcaagatttttttttttgatggtgacaggcttttactatattgcccaagctggttttgaactcttggcctcagggaatcctcccatctcaagctcccaagtagctggaattataggtatgcaccaccacgcctggtttcaagatgtttttttccatcattactgaatttctttattatgtcaaatatgtagtatttctattactgggggggaaatcaacactttcattttggaaacagaaaactcaacccgtacgctgggagctgcctcgggtaacgcagagctgtgcctgggtgcggggtcctataacatgcccgttctagtactgccatgaggaaggccccagcaccaaggggccctgacaagacagtgcctcatgggacacaggcttcacctagccctgtcctggtgactggaattccaggtggccctgaccccagatgcctttgctgggagtcctgccctggccaccaccctaatccacagtgtggctgcttttccaggtggtgtgaacttgaaggcctctccctgtggaggccggaaatggccctcaaccctggccgggtggctccccaatgaaaggaaggggttggggagggaatcctacatcccacagccccttcctgagaagagctgcccaggggaggttggtgccagcaggaagccaggcccaagcccacttcctgcaccggcttcctggaagagccagataagggggaagaaagggccatgtggccccggggcagctgctaggagaggcaggggaggagggctgcgggcggctgggtgtgcatctgactgggtgccaccagccacagagaaaacacaggagccacagactggcacacgggtctcatgcccaggtcgccctttactgtgaagaagccgtgggttttcctcagcaagcctgttttctttctctagtccgtaacaggaacgggaccttggacctcctcctggatcaccagggaaggcgcagaggtcaggctagcccttaaaggcccacctctcattctgcagaggaggcgccagcgcccacagcagaagtgacctgcccagggacatccagcaaggccctggcaaagctgcccagaggcaggtagcttgtagacacaccttccatgccagtgacagaccctcttgggccaccacctggtctcagcgaccaatagcacagcctgggaggacccacggcctccttgcctgtcacttgcagtcccatccaaaaagcagcagaaagaacatctgagaaacaaagagagctggtgggatggccacggaggctctcgcctgtaatctcggcactttgggaggctgaggcgggcagatcacctgaggtcaggagttccagaccagcctggccaacatggcaaaaccccacctctactaaaatacaaaaattagctgggcgtggtggtaggcaactgtaatcccagctactcaggaggctgaggcaggagaatcgcttgaaaccaggaggcagaggttgcagtgagccaagattgcgccactgcactccagcctgggcaacagagcgagactgtttcaaaaaaaaacaaaaaacaaaaaaacaaaacaaaagaaagactggctaggcgccgtggctcatgcctgtaatcccagcactttgggaggccaaggtgggcggatcacgaggtcaggagttcgagaccagcctggccaatatggtgaaaccccatctctactaaaaatacaaaaattagccaagcatggtggcgcacacctgtagtcccagctacttgggaggctgaggcagaagaatcgcttgaacccaggaggcagaggctgcagtgagctgagattgtgccactgcactccagcctgggtgacagtgacacttcatctcaaaaacaacaacaacaacaacaaaaaacccaaatagggttggtgcagacccactctcacaacactcctcaggcccgctatagagtcaaggcagacaggctctgccacactggccgccacacccattcctgccacctgacctttgcttctgctattgcctctgcctggggtgaccttccccaggctgctgaaacgtcacctcctttggccaggcccttttaatggccaccctctgcctcatgggtgtttgtttccatcataggatgcagccagtctttaattaccttgtttattacctgtgtccctcgctagactggaacactcaaagtgggtgtggactttgtccagggccaagcacaaggccaggcacatgagagggactcggtaaatatttgctgaataaatacacaagaaaaatgcacacactacccagggaggcatgcagggaaggcagaacactcgccccaccccacaggtaagggaaggagtggctgcgggacagggagctgcctgactcccaggccctcccaggctgcaatggcctgggcctgtgaccatatatcttgatttctcctacatcctcatctccaaactctgttggagagaggtcagaggaaggggtggatcctcaaaatcttaaaagaagatacatcaaagtgccaggtgaggctgggcacagtggcttgtgcctgcaatcacagcactttgggagactgaggtgggaggatcgcttgagcccaggagtatgagaccagcttgggcaacacaaaagattctgtctctacaaaaaatctagaaattagccaggtttagtgatgcatgcctgtggtcccagctacttgggaggctgaggtcaggtgggaggatcacgggccagtgaggttgaggctgtagtgattgtgccactgcactccagcctggatgagagtgagatctcagctctgaaaaacaaaaaaagtctagagtgcagtggctcacgcctgtaatcccagcactttgagaggccgaggtgggtggatcacctgagctcaggggttcaagactagcctggccaacatagtgaaacctgatctctactgaaaatacaaaaattatccaggtgtggtggtgcgtgcctgtaatcacagctacttgggaggctgaggtaggagaatcactctcggagaggtggaggttgcagtgagctgagattacaccactgcacttcagcctgggcgacagaacaagactctgtctcaaaaaaataaataaaatgaaatagaaaaagaaaaaaagtgccaagtgtgataggagaggccccaccctggtttatggaaggtcacaagaaaattcagaaaagagaattcctttctctgggctttcttggagcatctggaatctggttctcaggtctagatccacgaggacctaaacccagtgcctcctaattcaggaagctgtccaggactgcccatccccgctgctaacctaggccactccttctggccctgccctgacgacagggaactggaagtgtgtatcctgtgatggcttgtccattctcggctactcctccaggaaacagctggacagccaggactctggatgttcagaaggtgggaaggggctgaatgaatgagttcacactttgcccacgcaccgttctacatactgggaatctagtcggaagaaaaacgaagatcctgctcccacaaaacttaacacagggatggatccttccagctctgcccagtcttacatgccaactctgccctctaagtacaccgcagagagggacaggctctctgaatccttgcacttgaaatcgcctttgcaaaaattgtagcgggaaattatgacagtgaaaagagatcagacctaaccgactccattgtgcttctaacctttacgccatctttgcttattcctaggtataggccaaactaaccttgggaagggatttagtttatagtttgactctggaacaaaattggtaatagccctttcccgaaaagaccctcttcttgcctggggaccagtctgcctttgtaggactaacaaataagctacaagattagaaattaccatttaggtaacttcagcctctggctgcaagagtctgaaactccccaaattgctccttgggataacatcactattataaaatctaagatcagtgcttgagatattttgcagaccccgtacttgacggatcagctgacactacccagaccagtaatctggctcaaccagtcctgcgatcccacccaggaacagaagacagcaagaaaacctcacttcaacactcccgtcgatgactccatcgacctcaggaagctccaaccaatcagcactccccacttcctgagcccctacccgccaaattatctttcaaaactcggatcccctaatgctcagcggagactgatttgagcaataataaaactctggtctcctgcatagctggctctgtgtgaaatactctttctccactgcaattcccctgtcttgataaatctgtctaggaagacaggcaaggtgaacccattgggtggttacacactgaccagccggatttagggagagttctcactaatccacagttctgatgcagccacccctgggggaccctcctggttactgaatctcccactgtctcacagagtctggaagtcacatccccaacaagggccttggtttctctcattgaaaaaagaaggaccagaagctgatgggccaggaaactcccagctctgaattccttttccgatctgcacagtgggggacacgggcactttctagcccagatccagaacttccagaatcataaacaatgggccctgcagagacctgggccgcaatttttccttctttgtattgggaggatgtactttgtccacccctagctcaaaacgcccccttccgctggaatgacatgctatgtgacccaaggagaaacaccacaccccagcaccaggcctgcttttcagccagaaaccaagaggcctaggaggctgtgctgctagcatcttgcaagctctgaaattcctaaaactaagtttcacaactcagactggccccctacttcccagcactctagttttcaatcagggaggtcagactgggcccgaagcgtaagggaccccttccctgcccaaaaactctctgctgcatttggcggatccccaccttttttttttttacttcagtttccccacctgcaaactgggaaaactaactaaggcgaggccactgtactgtggatacaagtccgtgcaaccctaaatcccagacacgaacgtgatagagccacctgcagtctccggcctcagtttcccagcctcgtgccggggggcgggactcgaggctcggaccttacgttcgccccgcgccaaccaagcccacagcgcccgcccgcagggatcccaacgactgctgttcccgcctcccggtgagaccccgcagttgccctgccctcaccatggtgccggcggggaccgggctcgccggccacttccgccgccgccgctgcacacgctcccggcggtcgtcgccgcgccgcgcgccactaagctgaaagaaagtggcagagacgcaagccagtcagcaccgggctcgaagggcggtcaaccaatccacgcggagtagggcggggcccgctgggcgaaagggcggggcgggccgtgttcccgccggaggaacgaggacgagagccgtaaagtgccgcggcttgtaatgcaaaaggaggcggagcaacgcgcgccggcgcggggtgcattgtgaggaaatgcgtgcgcaggtgaaaccttcgtcggtctcctgggctccacgctgtgggcaaagccagttaatgcctttcgtttgcagtagagagagagaaatcgaggcttcgtggtgattgggccgtgcctgatgttgcccttccgactcctagttttctgattctgtaattatccagggaacatcatttaataggttggaatcctgaccacgaccctcggggcctcagtttgctccctgtaaatagtagtgtctgctccaaaacgttgcttactgtaaggatgaaatgaatgaaaccatgtaaaagcacttaaaacagcgtctggcacatattaagtacttattacctactctgtgcctgtttctgctcacagaatgaacaaaacacaaaattcgtggccctcagggagacagacagtaaacaaagtaaataggcgaatgctattagttttctggggcctgctgtaacaaatgcccacacactgcgaggtttaaaacaacagaacgtgattttctcacaattcaagagatcagaataatgaagtgaggttgtcagcacagttggctccctctggaggctctgaggacaatctgtgtgtcctatgcctctctcctgggttctggtggctgctgggaatccttggagttcttggcttgtagatgcagccttccgcgttctgcctttgtcgtcacttggccttctctgtgtgtctctgagtctcaaatgtatctctccttttttttttcttttttttttttgtagtagagacagggtctccctatgttgtccaggctggtctcgaactcctggggtcaagcaatcctccctcctctgcctcccaaagtgctgggattacaggcgtgagccaccgagcccggccgctcctttttcttgtaaaggacactcctttctcttattaagtccaccataaatttcaggataatgtcatctcaagatccttaattacatctgcgaagaccctgttcttttttttttgagatggagtctcattctatcacccaggctgcagtgcagtggtgcgatctcagctcactgcaacccctccctcctgggttcaagggattcttctgcctcagccacccgagtggctaggattacaggcacatgccacaatgcccagctaatttttgtatttttagcagagacggggttttgccatgttggccaggaggtggcctcgaactcctgacctcaggtgatccttccaccttggcctcccaaagtgctgggattacaggcatgagtcaccacgcccagcctcgtttttaaatgactgatgctatttattgacattattcataatatcaaaagactgaaaaaaacccaatgcgaccaaataatagagtaatacagctataaaaaggaatgaagacaatcttcatatactgacattgaatggtgtctggatatcttaagtgaaaaaaaccaaggtagagaacagtttttacaatatgtcctcttttgtgtgcaaaaagagaaatacatgcatgtgtatgtgtatatatatttgcatgtgtgtgtgtatatatatatatatatatattttttttttttaaccacaccaagcacgtgaaccaaatttgcttatatttttaataagaaacataaaggccaggctcagtggctcatgcctgtaattgcagcactttgggaggccgcggtgggcagatcacctgaggtcaggagtttgagaccagcctggccaatatggtgaaaccccatctctactaaaaatacaaaaaaattatctgggcatggtggcgggcacctgtaatcccagctactctgggggctgaggcaggagaattgcttgaccccgggaggtagaggttgcagtgagccgagaacgtgccactgcactgcagcctgggcgacagagtgagactctgtctcaaaaaaaaaaaaaaaaagaaacgtaaaaagtacgaaccaggccaggagcggtggcccatgcctgtaatcccagcactctgagaggctgaggtggctggaccacttgagcccaggagttccagaccagcctgggaaatacagcagcaaaaccctgaatctacaaaaaatgcaaacaagtagccaagtgtggtgactgtgcatgaagtctcagctactcaggaggctgagcagggagaactgcttgagcctaggaggcagaggttgcagtaagctgtgatcctgcctctgcactccagcctgggtgacagagcaacacactgtctcaaaacaaacaaacaaaagaagcatgaaccaaaatataggccaggcacggtgtctcacactttaatcccagcattttgggaggctgaggcaggtggatcacctgaggtcatgagttcgagaccagcctggccaacatggtaaaaccccatctctataaaaatacaaaaattatctgggcgtggtggcgcgtgcctgtagtcccagctactcagaaggctgaggcaggagaatcacttgaacccggttaggaggaggttacagtgcatgccattgcactccagcctgggtgacagagcaagactccatctcaaaaaaaaaaaaaaaaaaaaaaaagtaacctgggagaataagggaacaagatgaaatcataagaatgaaagccagacttctttcagtgtaccttattgtctagtttcaactttggaagcataattaaaaataaaagtcaaaaggaaaaatcaaaagaaatccctaaaaatggaaacaaacaaatgaacctcactgtatatcaagttgcaaagaccctatttcaattacagtcacattcacagctaccagcaggttaggatttggatatacgtgtgtgtgtgtgtgtgtaaatttttttacgactgcgtccctcttgcccaggttggagtatagtggtgccatatggcttattgcatccgcaacttcctggggtcaagtgatcctcccatctcagcctctgagtagctgagactgcacacaggtgtcaccgccacgcccagcttatttattaatttaatttatttatttattcattttgtagagatgggggtctgcttgttgccctgccctcaccgtgctagcctccaactcctgggctcaagagatcctcccaccttggcctcccaaagtgccaggattataggcatgagccaccatgcccagctgggatatatatttttaggggctactactcattacatcaagtatcagctgtggtagctttaaacataggcatttatttgagtagtttacttctccacagtgacatgcctatagtttttttttttttttttttttgaaacagagtctcattctgtcactcaggctggagtacagtggcgcgatctcggctcactgcaacctccacctcctgggttcaagcgattctcctgcctcagcctcccaagtagctgggattacaggtgtgcaccaccacacacagctaatttttgtatttttagtagagacggggtttcaccatgttggccaggctggtctcaaactcctgacctcgggtgatccacctgcctcggcctcccaaagcgctgggattgcaggagtgaaccactgtgcccggccaatgacatgcctatagttacatacacttgcaagcaggactataacctgaattcctagaagaggcttatctaggtgccaatcaaaggttccatcccctggccacatgccttgactttcaggcctacaaatgagcaataggggacctcataaagtgactccttgtatcccagcctcctgagtctcagcactgccctgagagccttttcttaccaagtccagggtgaggaacttctggctgaaaggaccctatgcctctcagagctgaactggggaacccttgttcaacttctcaaagattttcctgctgggcatggcggagcacgcctgtagtcccagctactcaggaggccgaggcaggatgatcgtttgagcccagcagttcgaaatcccaattccctgatccttctgactggcaccacatccaggtggagtggactctggaggtctgagaaagcccagggagccttataagaggaagccaggccaggcgcagtggctcacacgtataatcccagcactttgggacgccgaggtgggaggagatcacttgagccagaagttccagaccagactgggcaacataataagacctacgtctctactaaaaattttaaaataggccaggcatggtggctcatgcctgtaatcccagcactttgggaggccgaaagttcaggaaagttcaggttcaggaccagcctggccaacatggtggaaaccctgtctctactgaaaaaaaaaaaaaatacaaaaattagctgggtgtggtggtgcgcctgtaatcccagctactcaggaggctgaggtgggagaattgcttgaactagggaggtggaggctgcagtgagaccagattgcaccaccgcactccagcctaggcaacagagcaagaccccatctcaaaaaaaaaaaaaaaaagaaaaagaaaaagaaaagaaaatatggcgaaaccccatctctactgaaaatacaaaaattaggctggcgcggtggcttacgcctgtaatcccagcactttgggaggccgaggcaggtggatcacctgaggtcaggagttcaagaccagcctggccaaaatggtgaaaccctgtctgtactaaaaatacaaaaattagccaggcgtgttggcgggcgcctgtaatcccagctactcaggaggctgaggcaggagaatcgcttgaacccgggaggcggaggttgcaatgagctgagatcgcaccattgtactccagcctgggtgacagagcgagactctgtctcaaaaaaaaaaaaaaaaagattagctgggtgcagtggcctgcggctgtagtcccagctacttgggaggctgaggcaagagaatcacttaaggccggaaggcgcagtttgtagtgaaccgagatggtgccactgcactccagcctgggtgacaaagtgagactccatcataaaaaaaaaaaggaaagaaacagggtctatgaggtgtcccagcatcaacatggcgatgaaggtagcagcaaaccgcatgctgggtcatcctttctgacttttctagacttttctacatgcagtctttctttttttgcacaacttgcaaactcctattcatcgttgaaacctctgcttcggtgtccccttgtggcagccagtggttactgcagtttttttgtttgccctttcaacagtaagggtggccaatcagcgttccccatccccctggctacagggattggttaaagaaagagcacggaatttaccaaggccaatgagattctcccctgggaaggataccgagggctgggagggagaagagctggttcctggggagttaaagggaaagtccagcaccccttaggctctgtcctctggaagaagctttctgcagaaataatccagcagacacaagacaacggaggtactcggtggaaagggaagtatggtttgagcccctggatccagctatagttgaagccacagctatgatgagcttaaatgagcccaagaagttttttttaattgcttcatccacttggaatttgcagtctgtccctggcaaaagagccagtactaatgcatatctgctctgtgaactcttccttagctgccttgctcaaaagctaatcattccttctcttatactttgaactttagtaccctccactgatttccatcattgcctggtttatgccatgttgtaattgcttgtttcagccctctcaactttgacttgtaggagcaaggacctaagaggtttcctggggctctatttggggctgttcaggacagtttaccctcccctatcatcatgaatgcatgacccaggctggggcaatcagaaggcttccctggctggctgagcatggtggctgatgcctgtaatcccagcactttgggaggccggccggtggatcacctgagcccaggagttcgagaccagcctggggaacatagcgagacctcatctctccaaaaaaaacttaagaagaattagctgggcgtggtggcacgtgcctgtaattccaactacttgggaggctgagatgggaagatggcttgagcttgggatttcgaggctgcagtgagccatgatcatgctactgcactctaccctgggtgacagagcgagatcctatgaaaaaaaaaaaaaaaatcttccttgggatggttttgggattgcagagctggagtgatcggcgatcacagtcaggtatagccatggccatttcttcactgcagagtcatggccgtgtctaagcctgagcccagctgtatctgatgcttcataaatcttcattcttccgtattccactaaccaaaatcctattctggatccagcttaaattatatttctgaccgggcacagtggctcacacctgtaatcccagcaatttgggatgccaaggcgggtggatcacctgaggtcaggagttcgagaccagcctggccaacatggcaaaaccctgtctctactaaaaatacaaaaattagccaggcgtggtggtgggtgcccgtaatcccagctactcaggaggctgagtcaggagaatcacttgaacccaggaggcagaggttgcagtcagccgagatcatgccattgcactccagcctgggcaacaagagcaaaactctgtctcaaaaaaaaaaaaattgtatttcttccagcagaaacctaagaagtctagatcaatgtacgtctccaactaacaaaaataccctacccactactaaaaaaaaaagaacagcataaaagccagtactggcaaggttgtgatgaaactggcaaacatgtgtttccttttaaatgggaaaaaagttggtattatatctcaaaagctataaaagtatcacacccttcagctcagcaatccatttctgaacatttctactaaggaagtctttcgggtgaagggaaccaccatgccagggcctcacagcaatatcgccaattctaaaagagcaatattttgctgggcgcagtgcctcacacctgtaatcccaacactttgggaggccaaggcgggtggatcacttaaggtcaggaattcaaaaccagcctagcccaacatggcaagaccccgtctctactaaaggtacaaaaactagccagccatggtggcgtgtgcctgtaatcccagctacttggggggctgaggcatgaaaatcgcttgaacctgggaggtagaggttgcagtgagctgagatcacgccattgcactccagccggggcaacagagtgagactccatcttaaaagtaaataagtaaatagcaggtttttttaaaaaaaattagctgggccaggcgaggtggctcacgcctgtaatcccagcactttgggaggccaaggcgggcggatcacgagatcaagagatcaagaccatcctggtccacatggtgaaaccccatctctactaaaaatacaaaaattagctgggcatggtggtgatcacctgcaatcccagctgtttgggaggctgaggcagaagaatcgctggagtccaggaggtggaggttgtaaagagctgagatcgcgccagtgcactccagcctgggcaacaagagtgaaactccgtctccaaaaaaaaaaaaaaaggaaacgcagacaccctcctgggttgcgcttcgctggtcaaggcagtgaccctctcccatccggggaaccaggagcctcacatggatcaggcccttcctgatccatggccacctgagctgaaacaaaatatcatttgtaccttgcccagtgcattcctggggtgcaggcaaccaaagaacagaggttcatttgcccctgtccttggccgccttcatatcccagagtcagaagaagcagagattcctcaaatgggttttgttttgttttgttttgtttttgtttttgtttttactattttgagacggagtttcgctcttgttgcccaggctggagtgcagtggcgtgatctcagctcactgcaacttctgcctcctgggttcaagcaattctcctgcctcaacctcctgagtagctgagattacaggcatgtgtcaccacgcccgggtaattttgtatttttagtagagaccgggtttcttcatgttggtcaggctggtcttgaactcccgacctcaggtgatccacctgcctcagcctcccaaagtgctgggattacaggcgtgagccactgcacccagccatggggtctttctttcttttttttttttttttaagacagagtctcagaaagaccccctcaagtggggtcttgaaacttcctccactgtccacctacgcccagtggcctggtagaagttccttagatgggcacggagactgctggatccagccccccttcatcctgcacacatctctgcccccgcgcattaattgtgcacctactgtgtgctggcacagactaaagggaaagaagacccagcctcaacgttcaaactactccaggcgaaaagagggagaggcaggagtggggagtggagcagtaaatataccctccaaggggcgggccagggctggatgtgggagcaggggccatgggcagtggctgaccaccaaaagcacatctgtgggcctagtctttttgttgttgttgtttgagacagggtctcactctgttgcccaggctggagtgcagtggcaagatggtagctcaggccaggtgcggtggctcacacctgtaatcccagcactttgggaggctgaggtgggcagatcacttgaggccaagagttcgagactagcctagccaacatggtgaaaccccatctctgctaaaaatacaaaaattagctaagtgtgatggcgcgtgcatgtaatccctgctacttgggaggctgaggcaggagagtcacttgaacctgggaggtggaggttgtagagagccaagatcacacgactgcactccagcctgggcaacagagtgagactccatctcaaaaaaaaaaaataaataaaaggataatagctcactgcagcattgaactcctggactcaagtgatcctcctgtttcagcctcctgagaacctgggacctgatgagctcgctaccaccttcgggtgattttaaaattttttgtagagatagggttgcacagcctggtcttgaattcctggactcaactcatcctcctgcctccacctcccaagtatgagccttgtcttctagcctgagctccccaaaggcttcactatctccagacaccgcctggagaaaaaggacacattcatcctttaagaatgcatgtctgggccagccacggtggctcatgcctgtaatcccagcactttgggaggccaaggcaggtggatcacctgaggtcaagagtttgaaaccagcctggccaacatggcaaaaccctgtctctactgaaaatacaaaaaagtaaccaggcgtagtggcagacaactgtaatctcaactactcgggaggctgaggcaggacaattgcttcaacctgggaggcagaggttgcaatgagccgagatcgtgccattgcactccagcctgggtgacaagaacgagactgtgtttaaaaaacaacaacaacaacaacaacaaagaatgcatgtctgcccagacatctctctccctaccatggccatgaggccccctgcagtcctcaaactgggcttggtttactctgacagagccaaaaggacagagccctaacgcagagccgtgtcgtccccatgagctccaaatctccctcccttccaaggccactcctattagcaactggcaaagcccagagaggcttggagcccccaggggcaggatctgagcgccggtgcagagtccatgagtcctgccttcccccacctggctccctagggcttgggttcagggtggccttagtcctcagaagctccccaaacttccctgggttgtggaggtgggaggctagagaaaaatgtagcttctgcccagcgcagcgatacacatccgtgatcccaactactcgggaggctgaggcaggaggatcacacgagcccaggagttgtgggctgtagcgcactgtgctgattgggtgtccacattaagtctggcatcaatatggtgacctcccggagcagggaaccaccaggttgcccaaggaggggtgaaccagcctaggttggaaacggagatggtcaaaactccagtgctgatccgtagcgggatcatgcctgtgactagccactgcactccagcctggtcgacagagtgagaccctgtctctaaaaaagataaattttaggctgggcgagtggcttatgcctgtaatcccagcactttgggaggctgaggcaggcggatcacttgaggtcaggaattccagaccagtacggtgaaactctgtctctacaaaaataccaaaaaaaaaaaaattagccaggcggtgaaactctgtctctacaaaaatacaaaaaaaaaaaaaaaaattagccgggcatgatgacctgcgcctgtggccccacctactccggaggctgaggcacaagaattgcttatacctgggaggtggggtgagccaagattgcaccactgcactccggcctgggtgactgagcaagattctctctagaaaaaaaaagagatacatttaaaaaatgcagcttgttttgcaaaccaacatccagcttggcaggttttgctctatttagcatttttttgtttgtttggtttttttttagataggtattgctctgttgctctggctggtctcacactcctggcctcaagcaatcctcccacctcaccttcccaaagcgctgggattacagcaggggtccccaacccctgggctaaggactggtaccagtctgtggcctgttaggaaccaggccgcacagcagtaggtgagcagcgggcaaaccagtgaagcttcatctgtatttacagccagtacccatcactccccagtatctcctgagctccgccttctgccagaccagcagcagcagcattagattctcataggagtgtgaaccctattgtgaactgcacatgtgagggatctagattgtgcactccttatgataatctaatgcctgatgatctgaggtggaacagtttcatcctgaaaacatcttcatcccccccaacccccaagtgcatggaaaaattgtcttccataaaaccagtccttggtgccaaaaagattggggactgctggattacaggcatgagcctctgcgtcaggcttcacagcattgttttttgtttgtttgtttttttgagacagactctcgctccgttgcccacgctggagttcagtggtgcgatctcggctcactgcaacctccacctcccagattcaagcgattctcctgcctcagcctcctgagtagctaggattacaggcatgcaccaccatgtctggctgatttttgtatttttagtagagatagggtttcaccatgtttgccgggctggtcttgaactcctgacttcaaatgatccacccgccttggcctcccaaagtggtgagattacaggtgtgagccaccgtgcccggccatttattttattatttatttatttttattattttattttattttattgagatggagtctcgctctgtctcccaggctggagtgcagtggcgtgatctcggctcactgcaagctccgcctcccgggttcacgccattctcctgcctcagtctcctgagtagctgggactacaggtgcccgccaccatgccctgctaattttttgtatttttagtagagacagggtttcaccgtgttagccaggatggtgttgatctcctgatctcgtgatccgcccgcctcggcctcccaaagtgctgggattacaggcgtgagccaccgcgtgtggcctatttatttattcattgagacagagtctcgctccgtcgctcaggctggagcggagtggtgcgatcttggctcactgcaatctttgccgcctgaattcaagcgattctcctgcctcagcctccaaagtagctggaatcacaggcatgtgccactgatacgggagtgctgggatggggggagcgtggtgcctttaaatgatagggaagggaagtgcggggtaaaggagggcctggtccctggctagggctccacccccagagacctaggtgaggatccgcactcccgccttcgtgcccaaatattgcattttccaggaccacactggcccgccacgcccccatcctgtgcctataaaaacccgagaccctagcgggcagacacacaagctgctggacgtcttgacgtacacatccatggaagaagatacaagtggctggacagcgagaggacgtcgagggagcacgctcgcggaagggcacactggcatgcaggcgggtagtcgaccagtggaactaggctgagtttggcctgggcagtcagaggagagctggggccgcctagcgacccaactccagagaaagaccatctcccttctcgctcccccatctactgagggctacttccactcaataaaacttcatactcattctccaagcccaggtgtgatctcattcttctggtacaccaaggcaagaaaccccaggatactaaaatccctctgtctgggctgggcgcagtggctcatgcctgtaatcccaggactttgggaggcctaggtgggtgtatcactcaaggtcaggagtttgagaccagcctggccaacatggtgaaaccccatatctactaaaaataaaaaaaattagccaggtaagggtgcggtcacctgtagtcctagctacctgggaggctgaggcaggagaatcactttgaacccgggaggcggagatggcagtgaaccaagatcaagccactgcactccagcctaggggacagagcgagagtctgtctcaaaaaaaaaaaaaaagaaaagaaaagaaaaaaagaaaagaaatccctctgtccttgtgacaaggtagaggatctaactgagctggtaagctgcctatagatggcaaactaaaaaaagcaacctgtaacacacgccccctggggcttcaggagctgtaaacattcaccccggacactgctgtggggtcagagtcccacagcctgcccatctatatgctcccctagaggtctgagtagaggagcacttcagaagcaagccacacccccatcgcccaccctgcgaggggaacaagggaacctttcccgtttcaccaccatgcctggctaatatttttgtatttttaagagacagggttttcccatgttggccaggctggtcttgaactcctggcctcaagcaatccacctgcctcagcctcccaaagtgctgggattataggcatgggccaccacacccagccacagtcatccaattcatagagacagaaagtggaatgttgggtgctaggggctgagggaggggaatagggagggagcgtttaataggtatggagcttgtttgggaagaacaagttctggagatggatggtggtaatggttccacaacaatgtgaacgtacttaatgctacccaagggtatgcttaagatggtaaattttatgttatgtacatgttactacaaaccactgccccccaaccccggccgaggcgggcagatcacttgaggtcaggagtttgagaccagcctagccaacatggagaaaccccatctctactaagaatacaaaaattagccaagcatggtggcgtgcacctgtagtcccagctatttgggaggctgaggcagaagaatgacttgaacctgggagacagaggctgcagtgagccaagatcgtgccactgcactccggcctgggtgacagtctcaaaaaaaaaagttcctccaagttgggcatggtggcacatgcctgtagtcccagttacttgggaggctggggtgggaggatggcttgaccccagggggtggaagctgcagtgagctgtgactgtgccactgtgctccagtctgtgagacaaagcaagatcatatctcaaaaaacaaaaatatggcccaaacatgattagggctacgagtgaacattagcctttacgccagtcactggggcagtggggcatgactcagtttctccccatcactgctgactctacatgttttcgttcctcccattgcaattgaggaaactaaaatccactgtcacttccctctcgccttccctcttctagcaacgcacatactccacaccaggcacgtatgacatattcaggttataaaacctgcctttgggtgagtggtttttttgttttgttttgtttttttctgagacggagtctcgctctgtcgcttaggctggagtgcagtggcacgatctcagctcactgcaacttccgcctcctgggttcaagtgattctcctggctcagcctccccagtagctgggactacaggcacgcgccaccactcactgctagttttttgcatttttagtagagacagggtttcaccatgttggccaggctggtctcgaattcctgacctcaagtgatccgcctgcctcggcctcccaaagtgctgggattacaggcgtgagccactgcgcctggccaggttagtgttttgatctgctcttttctccctcttggcttggacctcattccctggccagctcagacagctctctgatgttctgcattctacctgaagctgctaaagaccaaaatagccactgagcgtgtgacctggggtgtgggcttccaaacagggctcaggggcagtctagagaactctgcccttggtgttggaggaattcgggggtggagccagtaaacaccatagtaccagctgggcacggtggctcatgtctgtaatctcagcactttgggaggccaaggcaggcagatcacctgatgtcaggagttcaagaccagcctggccaacatggtgaaaccccatccctactaaaaatgcaaaaattagccgggcacggtggcaggtgctggtagtcccagctattcaggaggctgaggcaggagaatcgcttgaacccaggggccggaggttgtagtgagcctagatcgtgctattgcaccccagcctgggcgacagagtgagactctgtctcaaacaaacaaacaaaaaaccatagtgtcttggcgaatgatggcaaagtcaaagtggaacgggctatcagtgaaccacacagtcaggagttctggctcatgcctgttatcccagcactttaggaggctgaggcaggaggattgcttgagcccaggatttcaagaccaacccaaacaggcaacatagcaagacctcgtccctacaaaaaatataaaaattagccgggcatggcagcacgcgcctgtagtcccagctactcgggaggctgaggtggaagaattgctttagccttggagattaaggctgcagtgagctgtgatcgctccattgctctccagcctgggcaaaagaacaagatcctgtctaaaaaaaaaaaaaaaaaaaaaattcgtgacccaagtccaaggtccagtcctgtttctgaagatgtggccagaaactcagctttcattttctacctgtttttagaggaattctggtctctgatgaatgttggcagaatgtgcctggggatgtgctgggtgttgagacgcagctctaacagaacaacgcttcctcctctagaagttctcatctctatgtcggaggaaacgggaagccaaccagagaggctgtgaccatactaaatgatttctgcttaataatacctggggagggggccggaggcagtggttcacgcctgtaatcccagcactttgggagctgaaaagggtggatcacctgaagtcaggagttcgagaccagcctggccaacatggtgaacctccctctctactaaaaatacaaaattagctgggtatggcggcactcgcctgtaatcccagctacttgggaggctgaggtgggagaattgcttgaacccgggaggcagaggttgcagtgagccaagatcacaccactgcactccagcctgggtgacaagagtgaaactacgtctcaaataaataaatacatatataatttctgcttaataatacctgggggactaaataatctgtacaacaaaccccatgacacgagtttatctatataacaaacctgcacatgtaccccaaaacttaaaagctaaaaaaaattaaaaatgatttctggccaggtgtgctggtttacacctgtaatcccagcacttttgggaggccaaggtgtgcggattgcttgagctcgggagttcgagaccagcctgtgcaacactatgaaacccccatctctacaaaaatacaaaaattagctgggtgtggtgccacacacctgtagtcccagctactcaggaggctgagatgtgaggatcagttgagccctggaggtcaaagttacagagctatgattttgccactgcactccagcctgggtaacagagtgagaccctgtctccaaaaaaaagagagagaaaggaaattatttctgagctttattgctatgaagaggatggaaccagggaatgagatggaaccactggggggtagcagtgaggtcatttcagccaaggagggccagaaggaaccctcagaggaggtaataggatagcagggaggtgatagccagagaaggccacaaggagaaagtgacagttcacccctcggaggaggtgacagccaggacaggaggagggcccctgggaggaggcgacattggaacactggagctgaggcctgaaggaggccagcttcgcaggtacctgcggggtgtgttccggcagagggaacagcaggtacaatcgccctcccccattagcctcctaggaccatgggggcctgcagagaaacttctggcaccacacaaatatggttgtcgtgtttttccttttttactctgtcctcccccacccccgccaacttcctggcctgaatgctgctcctgtgaccccttgaggcgagtgacctcggggaagtggcattctgtgcctcagtttccttatctggaaaacgggccttgctcgcggggacttccctccctaattctgcgcagtatgcatgcatagggcaggccctcaatgaacccttgcagaataaaggaccggctcatccccagcacctggctcagtgcgtgcaagcggctacacactacggcataagatgttcccattttgcagacggggaaacggaggctggggaataccgggcctagccgacgggggcggggcgcagggcgcgcacgctgcgtctcgggcccgggggcgcgcacgccgagcggctgaccgggggcgaggccgggggcttgacaggggcgtggcctcgcgcggccgagaggctgcagcggcagcagctgtcgcgccagtcgcaacagaagcaggtccgaggcacagcccgatcccgccatggagcagccgaggaaggcggtggtagtgacgggtacgctggctgatgggggctgtagcggcagcggccgggggcagaggcgggggcggctccgggactgcggggccgagaggggcaggtgctggaagtcctctcagatttggaaggtgtcatcacccgcgggagccccgcgcagcccaggcttcctggaaagtggaggaggaggagccttgggggtcccagggtcgggagtcagggcagtcgggcgcggggcttggggggccgggcaaaagcccggcgctgcgcaggcccccctggcgtcctttcctcccaaggtggggatggtgaccctcctggcacctgcctcctctgtctggcctgcgggctggactggacccttcctccctgccccttccgaggtccagcctgtccccacaccgctcccccaacccctggccccaggggacaaaggccgatttgcgggcaggaagtgtcccagtgacaaatgaacctcccagtcactgctcgccgcgccctgcgctcctggggggctactctcccaaggcaggggcaggtgggggtccggggacctcgggctctcccagctgtcccagggactgtcttcagcggaaacctttttgtgttttgtgccagggctgtttgttggtgagtcagggcccctgctgtcaccgactcccccccacccccaaaccaactgtttctcctccctgagactccgcctcggggccacgtggggcgccaacttccgctggggcctcagagtcaaggagtgggggggtcattttgacctgctgtctggaggggtcagagtgggaaatccagcaaaggtgcacacaggtgttttgtggctgttgaagggagattgaggctgatccaggagattcagggaagaaggaagaaacaaggcacctgcttaacaggtgtgtataattgggaggagggtcactgcccccatcccttccagccttcctttatctggttatttattccagcactttttgcatgagctgattacatctttactgtctccattttgcagaaagggaaactgaggctcacagaggtcatccagtttgtaaggggctgagctgagactcaaactttggctgtacagaaggatagagttaggaggtcccctcctgagccacagcccctacctgctatcccaggctacagcatctctgcatagcattcatatcctgtgggatcactggcccagatggaccgtatttttttttttttgagacggagttttgctcttgttgcccaagctggagcacaacggcgcgatctcggctcactgcaaccttcgcctcctgggttcaagcgattctcctgcctcagcctcctgagtagctggaattacgggcacgcatcaccccatctggttaattttttgtatttttagtagaaacggggtttcaccatgttggccaggctggtctcaaacttctgacctcaggtgatccgcccgccttggcctcccaaagtgctggaattacaggcatgagccaccgcacccagccccagatctggatttgaatcccagctttttcaccttcttgctgtgtgaccttgggcagctagcttcacctctctgtgcctcagtccctgctcctggaaactgggcctaggaaacacccttgcctgaaaggggatgtggccaggcttaatgccaggaagatcacttagcacagccttgggcgactgtcgtgttttggaaagggggcctggagtttgagctagcagggaggagggtgacaaggtgaaatctagacagcctggagggctcattcctcatttggtgccgattcagggcattttgggacagtgacacaataattgtaggttgagtcaaggggaccagaggaagtgaagacaggatcaggaccttttcggaggcagaagatacctctggcccctggctgagcatgaggggcaggtggaggtgaagacaggaagggactcattgacttcagagcggacaggtgcaggacggcggctctgacgggcctccaggtgctcccagaactcaggaccaggcccccaatgttgtccttggcagctgcgccctgaagctcctttcttgcttctccaggtgggagtagcggccaggccaggggcagactgggaagggccactcttgggtaatatattgcttttcctgttttttcaggatttggcccttttggggaacacaccgtgaacgccagttggattgcagttcaggtaacttagatccggagggtgggagtcaggcttggagctgggcacaccccagaaagttatggcatccaagaaggtccccttttaacaaaaacttttttttttttttgagacgaaatcttactctgtcacccaggctggaatgcaatggcacaatctcagcccactgcaaccttcgcctcctgggtttaagcgattctcccacctcagcctccagagtggcagagattataggtggctgccaccacgcccggctaatttttgtatttttagtagagtcggggtttcaccatgttggccaggctggtctcgaactcctgacctcaagtaatcctcctgcctcagcctcttaaaatgctggaattacaggcgtgagccactacgcccagccagctcttaaaaaacgatgtcggatccacatctcttcctggatggtaaccaccggagcacacatctgttgagtgtttgtaccccagcgctctgaatcctcccaacaacccatgcatagtacgtgtagttattcttgtgcccacttaacagaataggaaactgaggcccagaggagggatgaagggagttctccgaggtcacacagccaagaaatgggagtggcattgcctcagaagtgccccaggccctggccagcggctacagatctgggtctggagggccaggtgtggatataaacgtagctggtttccaggacacagctgtttatgtggtgctggcgtctactttacctaggaattatccaactctaggatctccctcttttttttttttttttttttttgagacgaaatctcactctgttgcccaggctggagtgcagtggcgcgatcttggctcactgcaaccttgccttctgggttcaagcgattctcctgcctcagcctccagagtagctgggattacaggcacctgctaccacgcctggctacttttttctatttttagtagagatggggtttcaccatgatggccagactggtctcaaactcctgacttcaggtgatccacccacctcggcctcccaaagtgctgggattacaggtgtgagccactacccccggccaggatctccctcctttttaaaaatcttttccattgactcagacaaatcgtgactcaggttggtttctgaacagccaaagtgagaattctctggtatgttttaggcaggtaattcatggttcaggaaggaccaggcaggaatatgtggggtggggtggcaggggaacatatcttgaccttgtaggaaggggtacagtgagcctcgctgtcatctcctcgcagctgggggaggaaaagatggcatattaggggccgaggggggctgtcattcctggtgccctgaagaagatgccagtctgcaaaacctttctagtttcttttccagatggagtattttgtagggacaggctggggagcaatgcacagagagaaagacggaagtgttttctcgttatataaatcagatcggcagagaccagagccaaacccctgtttatcctagcctatgagctgcctgatttaaagtaacctctgttcccattccagaatcctagatttggagaaaaatctaagttgaaacctcagcgtggcagtccccagctgtaccccccattttttaatcaccccctcatccccaacttcagacctcaaagttttggctgtttcccttttttttttttctttcctgcccacttcgtgaacgggatggagggacggggtcccgggaccctgcagatgggagcgtgcccgaggccctgcctgctcacccgctccccggagagccagacaaaaagaaacagcatgtttctgaagacttgtgtgtcaggctttgtgcacatttcagacaggagccttcacggggctgagtggacacaaagccgggtgtctgaattcctgggccccagacactgatctacatctaaatagaagaaaaatcaattaaacaatctttggaaatccctccgagcttcggggcttctcggatggtgaaggatggcagctttttatcttgtggccagagaggaaatagcccttctccttggttctcctctctccagacctgcagtttccactttttgctttcttttttttctggagacacagtttcgttcttgttgcccagactggagtgcaatgtcacggtatcagctcacttcaacttccgcctcctgggttcaagcgattctcctgcctcagcctcccttagtagctgggattacagctgcgcaccaccaggcccggctaatttttgtatttttagtacagacgaggttttgccatgttgaccaggctggtcttgaactcctgacctcaggggatccgcccgcctcggcctcccaaagtgctgggattacaggcgtgagtcactgcgcccagccccacttttcactttcttcccaaagtttaggacacaagattccccaccattcgcctgccaaaaagatgccaaccttcttagatctgattgtttcacttaaacaaaacaaaacaaagtttaacatatatacacccagaacactcattagtgaaattttaggcctgatatgatggctcacgcttgtaatcccagcactttgggaggctgaggcaaggagttcgagactatcctggccaacatagcaagaccccatctctaaaaaaaaaaaaatacaaacagccgggagtggtggcgcatgcctgtagtcccagctactcgggaggctaatatgggaggatcacctaagcctggggaggtagaggctgcagtgagccctcatagtatcactgcactctagcccaggtgacagagctagaccctatctcaaaaaaaaaaaaaaaaaaaagaaaagaaatttggccaggcacagcggctcacgcctgtaatcctagcgctttggaaggctgaggcgggcagatcgcttgaggtcaggagtcaagaccagcctgaccaatatggtgaaaccctgtctctactaaaaatacaaaaattagccagaaatcacttgaacccaggaggcagaggttgcagtaagccgagattgtgccactgcactccagcctgggtgacaaagcgagactctgtctcaaaaaaaaaaaagaaattttacatatgtgcacccccaagggccaggtcaagatctcgaacattctctggttcttcctcgcattcttcacagaagccccacatagcctctcccccaagtactcccaagccctcccgatgtaaacctctgcagacttttttgcgccagtaggtgaattttgcctgttccagaagttggcaggaacaagcagcttccaggtgccacacctctgcgagaaccgcccctggagttgctgcttggttccttcctgtcctggatttgcctgttagaaaggtgtcactgctggatgggttgaatccattcctccaaaaaatgtgccctggagtgttgttggtgtaatgcaggcaactgttgccaggcgtcacctccacccaaagatgggtgttttgttctgcactgtgggtggcaattgcttcctgccgtgaccgatttttcggaagctcctcatccttcagggaccccctaagtacttctctgtgtctctcccctcttgctccctctgggtctctctctgtctctttcctttcttctatctgttcatatctgtgtctctcttcatctctctgtctcttctgtctctctctctgtcactttcaccttctctatctgtgtgtgtctgtttctctcttttttttttttttttttttttttgagacagagtttcgctcttgttgcccaggctgtagtgcaatggcacaatctcagctcaccgcaacctccgcctcccaggttcaagcaattctcctgcctcagcctcctgagtagctgggattacaggcatgtaccaccacgcccagctaattttgtatttttagtagagacagggtttctccatgttggtcaggctggtcttgaactcccgacctcaggtgattcgcccacctcggcctcccaaagtgctgggattacaggtgtgagccaccgcacccggctgtttctctctcttgtgtctttcttcctctccctctcgtctctttctgcctctctctctctgggtttctctgttccttcccacctcgtcccttctttctctctccgtttctctctttctcgctctcttttttttttgagacagggtctcactctgtcgtccagactggagtggagttcaatggtcgattgaacgagtgaggtgagcaatctcagctcacctcatccttgacctcccgggctcaggtgatcctcccgccccagcttccccattagctgggactacaggcatgcaccaccacacccagctaatttttttttctttctttctttcttttttttttttttttttgtagagatgggatttggctatgttgcccagactggtctcaaactcctgggctcaagccatcctcctgtcttagcccctcaaagtgctgggattacaggcataaacctccatgcccatccttctctgtttctctctgtctccctgtctctctctctctctgggtcttactatctcttcccctttctctctcttcctctctatctttgttaatctccgtgtgtctcagtttctctccctgtgtgtgtctctgtctccttgtttctttctctctgaatctgtctctttccccttctctctctccccatttctgtttctctctgactccatctctctgtctctgtctctccttttttttttttttttgagacagggtctcactctgtcacccaggctggagtacagtggtgccatcttggctcactgcaacctctgcctcccgagttcaagtgattctcccgtctcagcctcccaagtagctgggactacaggtgcacgccaccacgcccagctaatttttgtattttcagtagagacggggtttcaccatattggtcaggctggtctcgaactcctgacctcgtgatccgcctgccttggcctcccaaagtgctgggattacaggcatgagccaccgcgcccggcctgtctccgtctcttctgatcctttctctttgtcccctgggtgaagtcatgcccacagcataggtggaactgtttcccacccgcagtgttcaggaggtgggagttggtggggtacagaggggacccccccttgtctttcctgggatggcagcttcccccagcaccccaagcacgaggcaccatgtgtctcgtgtgtcccgtctcccctacctctcagggtggactggggcactggctgtgtttctcttccgaggaggtgcaggtgggtgttaagggctggggagctccggggctcggggccatctggggtgtctcttgccaaagctgggtgaggaggacccgggtcacagaacttggtaacatcacgggacaattgctgccacagtgagtctagacagacctgctaaggatattaccagggaacaaagagggtctttgtcgtggggtcaggggaatcggtcagacgaggctgcgcggcggggtcctgtcaggtagatggggtgtagacaatggggcgtctgcccgagccccgtcctttcacggtgtatgctttgatggtgcatgaggccgggtgtgctgctggcaaagtgatgtgggacttggggtgccctgccccccttctcccggaggagaaccatccaacccttttggaacagagcgtgttcagaggctaagacttcagccagattaccagccacacacttccttctagtgccagatacactgtatggcaggtggctccctgccgttaccctatttaaaattgagtgataatttacatcaggcaatgtgaacagaccttaagtttccctatcactttggtgagaaactttttttttgttttgagatggggtcttgctctgttgcctaggttggagcgcagtggtacaatcatagctcactgcagcctcgacctcctgggctccggtgatcctcttgcctcagcctcccaagtagctgggactacaggcatgcaccaccatgcctggctaattttttaaattttattttttgtagagatgggatctcactatattgccctggctggtcttgaacttccgggctcaaatgatccttccacctcggcctcccaaagaagctgggattataggtgtgagccaccgagccctgccatcaggtgggtcttggcaaacacacacatgaacacctctcttgtgactgcaggtcttggggtatgtgtatatgctgacagtggttttctttctttcttgtttttttgtttgtttgttgttttttatttttgtttttgagacagaatctcactctgtcatccaggctggagggcagtggtgcaatctcagctcactgcaacctccacctcccgggttcaagtgattctcatgcctcagcctcctgggtagctgggactcagctaatttttgtatttttagtagagacagggtttcgccatgttggccaggctgatcttgaactcctggcctcaagcaatcctcctgcctcagcctcccaaatcgctgggattacaggtgtgagccacccacccctgaccctatttttctgaatacagctttccctgttgatttttaaagtaacacatcccatgagactcaagacatcaccttgtgcccattagggaaaagacagaaaagaggcagatctgttgatatgggactatgggttgttttattttattgtttttgattttgtaaaacactgaaatggtttaaaagtcaaaatcatgcgatgagttttttgcatagaagtctccctcccgtccccatcgccgctcccattccttccttgcccagaaggtggcacagtctcgccacgggtcatgccgggaaatccctccaggttggtccaaacagagattactcattcttttaaatattttcattttgtttttaattttgatgaaatccagtttatcaattatttttcttttattgtctgtgcttttcgtgtcatttggtgtgtgggggctttttggtcttttttcgagatggggtctcactgtgttgcccaggctgacctcaaactcctggcctcaagtggtccgccccagtagctgggattacaggcatgagccactgtgcctggctgctgatttgttttttgtttgttggtttgttttgagacacagcgagactctagctggagtgcagtggtgtgatcttggctcactgcaacctccacctcccaagttcaagcgattctcctgcctcgccctcccgagtagctgggactacaggcatgcgacaccacgcctggctaatttttttgtgtatttttagtagagacggggtttcaccatgttggccaggctggtctgaaactcctgacctcaaatgatctatccatctcgaccttccaaagtgctgggattacaggcatgagccactgcacccggcctgttgatttgtttttaagagaaaagagctctgtgggtctcctcttggagattaggggaagacgcatttataaacggtaaaattttctcctctgggacgtattgaatatgaggtgggaaaaccaggcttcagtgtaacgatctctctcaatagcaagtatgtattgactgatctgcagtgcagcaatgcccctacttggcatttatgccccacccatcagcatgagaagtttgcatgaggacgttcactgcagcttggctttacagtaaggaaaattagaagccacttagatgttccaatgtaggggaatgtttaaatccatagcgaccagtttctgaggtggagtattatgcagcagagaaaaggatgcgctgagatctccgtatagtaatgtagacagatctctgaaatagactgctgagtggagcaaacagagttgcaggataaaatcaatggctgggcacagtggctcatgcctgtcatcccagcactttgggaggccgaggtaggaagatcgcttgagccctggaggtcaaggctgcagcgagcgctgatggcgccactgcactccagcctcagtgaccagagctggaccctgtctcagaattgcttttttactgcctatgaatggaaaagcagcagtaaatctttttaaaaactttacttttggccgggcacagtggctcacgtctgtaatcccagcattttgggaggccaaggtgggcggatcatgaggtcaggagatggagaccatcctggccaacatggtgaaaccccgtctctactaaaaatacaaaaataagcggggcatggtgcctgtaatcccagctactcgggaggctgaggcaggagaatcacttgaacccagaaggtggaggttgcagtgagctcagatcgcgccactgcactccagcctgggtgacagaatgagactccatctcaaaaaaaccaaacaaaactttacttttaagtgctgttggactttgtctcaatgcaatttttaaaaaaggataaaatcaggccaggcatgatggctcttgcctgtaatcccagcactttgggaggctgaggcaggcggatcacctgaggtcggaagttggagaccagcctgaccaacatggagaaaccctgtctctactaaaagtacaaaattagccaggcgtagtggtgcatgcctgtaatcccagctacttgggaggctgaggctggagaatcacttgaacccaggaggtggaggttgcgatgagccgaaatcccgccattgcactccagcctgggcaacaaaagcaaaactccgtctcaaaaaaaaaaaaaaaaaagaagataaaatcgatgtaaaaacaagccagatgtggtggtacatgcctgtagtctcaactaaggctaaagtgggaggatcgcttgagtctaggagttcaagaccagcctgggcaatgtagcaagaccccatctctaaaagaaaaaattctatgggatttctcaggtgtgtgaataatagattagaaacaggtctgcatggggctgagtgcagtggctcatgcctgtaatcccggcactttgagaggccaagggggggctgatcacttgatctcaggaattgaagaccatcctggccaacatgacgaaaccctgtctctactaaaaatacaaaaattagttgggtgttggccgggcgcggtggctcacgcctgtaatcccagcactttgggaggccgagatgggcggatcacgaggtcaggagatcgagaccatcctggttaacacgatgaaaccccgtctctactaaaaatacaaaaaaattagccgggcatgctggtgggtgcctgtagtcccagctactccggaggctgaggcaggagaatggcgtgaacccgggaggcggagcttgcagtgagccaagattgcggcacgccagcctgggtgacagagcgagactccgtctcaaaaaaaaaaaaaaaaaaaaattagttgggtgttttcccagtactcgggagtactgtaatcccagtactcgggaggatgaggcagaaggaactcttgaggccgggaagcagaggttgcagtaagacaagatcatactactgaatgatttttgataatccatctcaaaaaaaaaaaagaaagaaagaaacaggtctacatgatgtgtgccctgtcacctctgtggtgtgaagatgggaattagtgtaggtttgttgacggaacggatggtggggcctttgaaaaatataattgtctttttttttttgagacagagtcttgctctgtcgcccaggctagagtgcagtggcacaatctgggctcgcactgcaacctccacctcccagattcaagccattctcatgcctcagcctcccgagtagctgggagtacaggtgcgcaccatcacgcccagataatttttgtatttttcataaagacagggtttttccatgttgaccagggtagtctcgaactcctgacctcaggtgatcctcccgcctcggcctcccaaagtgctgagattacaggcgtgagccaccgtactcagccacctctcactattattcaactttttctgggatactgctgagttacttggaaacaggttgaatcttttttttttttccttgagacagagttctactcttgtcacccaggctggagtgcagtggcacaatctcggctcactgcaatctctgcctcccaggttcaagccatactcctgcctcagcctcctgagtagctgggattacaggcacctgccaccatgcccggctaatttttgtattttttagtagagacggggtttcaccacgttggccaggttgatcttgaactcccgacctcaggtgatccacccacctcagcctcccaaagtattggaattacaggcatgagccaccgggcctggttcatttttttttttttttgagacaaggccttgccccgttgcccaggccatagcgcagtggtgcaatctttgctcactgcatgcagcctccccctccctggctcaagcaatcctcccaccttagcctcccaattagctgagactgcaggcatgtgccaccacatccagctaatttgtattttcgagttttgccgtattggccaggctggtcttcaactcctgggctaaagcaatcctcctgccttggcctcctaaagcactgggattacaggcatgagccactgtacctggccaaattaatcattttaaagtatataattgcatggcattaagtacactcactgtgttgcgcaaccatcatctctatctagttccagaacattccatcacccgaaaaggagaccctgtccccatcagtagccattctccattcccctccctcagcccctggcagccactcgtctgcttcctgtctctatggatttgcctgctctgggcatttcatatcaatggaatcatacaatatgtggccttttgtgtctggcttctctcactcagcatcatgttttcaaagttcatccacattgtaccacggatcagtgcttctttccttttcatggctgaatcgtattccatcggatggatggaccatatttcatttatccatctgttgatgggcatttgtgctatttctaccttttggcttttgtgaatactagagaggcttctttttacaaattggacacagtggctcacccctgtaatcccagcactttgggaggccaaggcaggtgaatcacttgaggtcaggagtttgagaccagcctggccaacatggtgaaaccccatctctactaaaaatacaaaaattagctgggcgtgatcccgcatgtctgtaatcccagctactggggaggctgaggcttgagagtcacttgaacccaggaggcagaggttgcagtgaaccgagatcatagcactgcgctccagcctcggtgacagaatgagactctgtctcaaaaaaataaaagactcttgggaggcagaggcaggtagatcacgaggtcaggagatcgagaccatcctggctaacacagtgaaaccccgtctccactaaagatagaaaaaattagccgggtgtggcggtgggtgcctgtagtcccagctactcgggaggctgaggcaggagaatggcatgaacccgggaggcggagcttgcagtgagccgaggtggcgccgctgcattccagcctgggtgacagagtgagactctgtctcaaaataaaataaaataaaataaataaaagactctgttgcagggcacagggtctcaccctgctgcccaggctggagcgcagtggcacgatcatagctcactgcaacctcaaccgcctgggcttaggtaatcctcccatctcagcctcctgaatagctgggaccacaggtgtgcaccaccatgcccagctaatttttaaagtttttgtagaggccaggtctcactatgttgcccaggctggtctcaaactcctgggttcaagcgatcttccagcctcagcctctcaaagtgctgggattacaggcatgagccactgcacccagccccatttctaaaataataacagtaataggataatggcagccaatgtcatttgaacacttaaaatatgccagacatggtgcttagaactgttagcgtgagtgagcacatttaattttgaaagctatcctgtgaggtaagtcgatactttttttttttttttttttttttttgagacggagtgttgctctgtcacccaggctggagtgcagtggcacaatcttggctcattgaaagctctgccttccaggttcatgccattctcctgcctcagcctccccagtagctgggactacaggcacacgccgccacgcccagccaatttttttgtatttttagtagagatggggtttcactgtgttagccaggatggtctcgatctcctgacctcgtgatccgcctgcctcggcctcccaaagtgctgggattacaggcatgagccaccgcacctggcctttttttttgagatggagtttcgctcttgttgcccaggctggagtgcagttacgtgatcttggctcactacaacctctgcctcccgggttcaagtgattctcctgcctcagcctcctaagtagctgagattacaggtgtgtgccactgcacccagctaattcttgtatttttagtagagatggggtgacaccatgttggctagactggtctcgaactcctgacctcaggtgatccgcccaccttggcctcccaaagtgctgggattacaggcctgagccatcaggcctagcctgatactctgttattcccattttacagatgaggaaactgagactcagagagattaagtggattgcccaaggtcacacaggcaggattgagtccaaggagcctgggatttaaccccagggaccatagaatcatgtcaccttccatagagatacagagagactttgaggcaagagggtggggaaggaaatgaggggctttgaactaaatcaacacacacccttgccatcctgcagaatgagtctggagaacgcctgtttgtttcaccccccagagagcgcattatccccatagctgtcatctggggccatgacactcccactctcctctcttccaggagctagaaaagctaggccttggcgacagcgtggacctgcatgtgtacgagattccggttgagtaccaaacagtccagagactcatccccgccctgtgggagaagcacagtccacaggtgagtggtgccaaggggcggcacttcctcatcaggacttacaggttggcacccttcatgtggaggacttaggtggctttggtcctgatcagatcacgtgaccaatgccatacagccttgtcctcaaaagggcttttcaggccgggcatggtggctcatgcctgtaatcccagcacgttgggaggccgaggcaggtggataacctatactcaggagttcgcaaccagcctgggcaacatggcaaaaccctgtctctactaaaaatacaaaaaattagccgggtgtgatggtgggcgcctgtagttccagctactcgggaggctgaggcaggagaatcgcttgaacccgggaggcggaggttgcggtgagccaagattgtgccactgtactccagcctgggcagcagagcaagacctgtctcaaaaaaaacaaaaaaacccaaagggctatccaggccaagggtagtggctcatgcctgtaatcccagcactttggaaggccgaggcaggaggattgcttgagtctaggagtttgagaccagcctgggcagcatagtgagatcccatctctacaaaaaaatttaaaaattaggcatgatggtacatgcttatagtcccagctactcagaaggctgaggcaggaggattgcttgagcccaggaatttaagactgcagtgagccaagatttttatgccactgcactccagcctgggcaacagaacaagtctcttaaaaaaacaaacaagaccaggcatggtggctcacgcctgtaatctgagcactttgggatgctgaggcgggtggatcaccggaggtcaggagtttgatcccagcctggccaatatggtgaaaccctgtctctactaaaaatacagaattagccaggtgtggtggcgcatgcctgtaatcccagctacttgggaggcggaggccagagaatcgctggaacccaggaaggggaggttgcagtgagctgagatcgcgccactgcactccagcctgggcgacagagcaagactccatctcaacaaagaaacaaaaacactgcattggcattttaacacttgcatagcagctcattatttattgaactaactccgctggatggctagttaacttgtttgcagtatttgattttgataacaagaacagctgcagtgaacagcccttcatgtttcaaattcttgcctgtcttacatggcatacctttttccaagagtgactgcagggtctattctagcagcaagaggtcagaaacaacacaaccccaggcagagctcattaaggatgctgccttttccctggcctcagggggacccctctgagtcccacgggcaggccatgttaagtcctgcccctgtctgtgtgcagctggtggtgcatgtgggggtgtcaggcatggcgaccacagtcacactggagaaatgtggacacaacaagggctacaaggggctggacaactgccgcttttgccccggctcccagtgctgcgtggaggacgggcctgaaagcattgactccatcatcgacatggatgctgtgtgcaagcgagtcaccacgttgggcctggatgtgtcggtgaccatctcgcaggatgccggcaggtagggccctgtggggtgggagtgagtggggatttccctcctccacccactgagcctggtgtagaacaagccaagcgtgttgaccttggcctctttggaccaagcactcagtgtatactaggcacagagccaagtatttgtacgtagcaggtgccgttggttctgctcctgggactcatggatctgcccacttctccccaccatcacggtccccaccaaggcccccagcatctcccacctggacactgccccagcctccatctcagtcttcctccctgctgcctccaccccaacccaagcagtcagtttctgtgttaatttcctggagctgctataacaaatacccacaaactgggtggtttcatataacagaaatgtattgtctaacagccttggaagtcagaagtccaaggtcaaggtggtagcaggactggttccttctggaggtgctgagggtgagtctgtcccaggcctctctcctgcagctggtggctgctggccatccttggcttgtagacacatcgctccagtccccgcccctatcctcacatcactttcttccctttgtgtgtggccgtgtggtcttcttattaggacaccagtcattatatttaggactcatcctaatccagtatgacttttttttttttttttttttttttgagacggagttttgctcttgttgcccagcctggagtgcaatggcgtgatctcagctcactgcaacctccacctcttgggttcaagcggttctcctgccccagcctcccaagtagctgggattataggcatgcaccaccacgcccggataattttatacttttattagagacagggtttctccacgttggtcaggctggtctcgaactcccgacctcaggtgatgcacccacctctgcctcccaaagtgctgggattacaggcatgagccactgcgcccagccgacctcatcttaatttaactaattacatctgcaaagatcctctttccaaataaggtgacattcttttttttttgagatggagttttgctcttgttgcccaggctggagtgcaatggcgccatctcggctcactgcaacctccgcctcctggctcaaacaattcttctgctccaggctaccaagtagctgggattacaggcgtgcatcaccagacccagcaaattttttgtatttttagtagagatggggtttcaccatgttggtcaggctggtctcgaactcccgatctcaggtgatccaccctcctcagcctctcaaagtgctgggattataggcatgagccaccaaacgtggcccaaataaggtcacattctgaggtcccaggtgaacacgaatgttgagggagatgattctattgcaaaaggtcttttataaatttaaatcagggccaggcgcagtggctcatgcctataatcctagcacttcgggaggccaaggcaggaggatcgcttgagcccaggagttcaagaccagcctgggcaacataaggagaccccatctgaacaagtaaaaaaaatagcaggctgagacaggaggattccttgagcttggagttcaaggctgcagtgagctgtgatagcgccactgcacttcagtctgggcaacagagcaagaccctgttggctctaaataaataaatgcatgtgttcctttcctagaccttccctatggctcccattgcacatagaataaaattccaaccctggcccttggcccgcctctccaccccgctctgcctctactcaccccatatccattgcactccagacacatgaaccagcttcctcctgctcctcaaacacaccaagttcactccagcctcagggcctttgaacaccctatggcctctgcccagaacaccttcctctgggaacacctctttccagtctttttttttttttttttgagatggagtctcgctctgtagcacaggctggagtgcattggcgcgatcttggctcactgcaacctccgcctctgacgttcaagtgattctcctgcctcagcctcccaagtagctgggattacaggcgtgcgccatcattcccagctaacttttgtatttttagtagaggcggggttttgccatattggccacaccagggtggtctcgaactcccgacctcaagtgatccacccacctcagcctcccaaagtgctgggattataggcctgagccaccgcgcctggccctctttccagtcttaattccaacacgagtcacctccttgtgacttgtaggcctctccaactccccagaccaagttataccctcccagcaccagcttcctcacttttccctaatctgtgcgcttgtccaactcaaaggcagctattggtcaatgcagttgagtagctgaaggaaggaatgcctggatttaccatcaggatttttgtttttggagacaggatctcgctctgttgcataggctggagtcaagtagtataatcacagctcactgcagcctccatctcctgggattaagtgatcccccgcctcagcctcccgagtagctgggactgcagatggacaccaccacgtccagctaatttttgtattttttgtagagatagaatcttgctacattgcccaggcaggtcttgaattcctgggctcaagtgatccttgtgcctcggcctcccaaagtgctgggattataggcaaaagccaccgcacaccactgagttctttttaaagctaactttttctcttttttaattgaaaactaattgttatttagttgtttatttattttgacaggatctcgttctgtatcccaggctagagtgcagtggcaaaatcacagctcattgcagccttgactttttgggcttaggtgatcctcccacctcagcctcccaggtagcacaaccaaacccagctaatttattttttatttttattttttttgagacagagtcttgctctgtcgcccaggctggagccaggctgcagtattgtggcacaatcttggcttgctgcaacctccacctcccgggttcaagcgattctcctgcctcagcctcctgagtagctgggattacaggtgcccatcaccacacccagctaatttttgtatttttagtagagatagggttttatcatgttggccaggctggtctcgaactcctgacctcaggtgattcgcctgcctcggcctcccaaagtgctgggattacaggcatgagccaccgcgcctggcctaattttattttattttagtttttttgagactgcgtctagctttgtcacccaggctggagtgcagtggctcgatcttgttgcactgcagcctccatctcccgggtcaagtgattctcctgcctcagcctgcagagtagctgggattacaggcacccaccaccacacccagctaatttttgtatttttagtagagatggggtttcaccatgttgcccaggctggtgttgaacttctgagctcaagcaatatgcccaccttggcctcccaaggtgctagaattacaggtgtgagcctccgcacccagctcaattttctttctttttttttaaagacaagagtttcgctcttgttgcccaggctggagtgcaatggcagaatctcagctcaccgcaacctctgcctcccaggttcaagtgattctcctgcctcagcctcccaagtagctgggactacaggtgcctgccaccatgcccagaaaatttttgtatttttagttgagatgaggttttcagcatgttggccaggctggtcttgaactcctgacctcaggtgatccacccgccttggccttacaaagtgctgggattacaggcgtgagccaccgcgcccggccacccagcccaatttttttgtatttttggtagagacaaggtgttgcaatgttgcccaggctggtctcgaactcatggagtcaagggatcctcccacttcagcctcccaaagtgctgggactacaggtgtgagccaccatacccagcttccatcagtctctttataaaattaatttttaatcataggtaactctagaacatatcctcatatgtctaattgggaaaaattctcattccctctctttttccatagcggtccctctgataagtcagacacggaaaccatgaagctcctactgactgacacgtttccgtacatatatacatcacttggcctgctgctttatgattttatcttgttttgctttgcttttacgtggatggagtcacatggcgaaagtcacacttactgagaattctcatccttagttttcatttgtgagcgttcaacatgcatctggcgagttctccatttttttctggctgtaccacattccttgtaaacagattcataggattccatggtgtggataaaccagagtttactaagccactccctgtcagtgggctttaggttgctttctgttttcctgcttttatacataatacgatggggagcatccctgtttgtactttcttgtacccttgtgcagatggttcctgagggtagatctaaaaacgggaaataggccaggcgtggtggctcacgcctgtaatcccagcactttgggaggccgaggcaggcgaatcactcgaggtcaggcgttccagacctgcctagccaacatggtgaaaccccgtctctactaaaaacataaaaattagccggatgtgctggcaggcacctgtaattccagctactcgggaggctgaggcaggagaatcgcttgaacccgggaggcgaaggttggagtgagccaagatctcaacactccactccaacctgggtgacagagtatgactccgtctcaaaaaaataaataaataaaaataaaaactggaaatagggccaggcacggtggctcacacctgtaatcccagcactttgggaggctgaggtaggcggatcactacaggtcaggagtttcagaacagcctggccagcatggtgaaaccctgtctctactaaaaatacaaaaattagccagacgtggtgtggcccacgcccgtaatcccagctactcgggaggctgaagcaggagaatcacttgagccgaggaggcagaagttgcactgagctgagattgtgccactgcactccaacctgagcaacagagcagactctgtctcaaaaaaaaaaaaaaaaaaagccagtggtggtggtgcacacctgtagtcccagctactcaggagggtggggtaggaggatcgctggaggccaggttgcactccaaactgggtgacagagtgagaccctgtctcaataaacaaaaaatggaaataccaggttgtaaagtctgggtgattataattttactagcctgacaaattgccttccacacggggacaaccagcgtgccttcccaccagcaatagctcactctgcccatttccccacatgtgccacagcactgggagttatcaagttttttttgtttgtgtgtgtgtgtgtgtgtgtgtgtgtgtgtgtgttttaaagagacaggatctcactctctcacccaggctgagtgcagtggtgcaatcatggctcactgcagccttgacctcctgggctcaaacaatcctcccgcctcaacctcctgagtagctgggactacaggcacgtgccaccacctctggtgattttttttcatctttgccaacctggggagggaggagagtgttgttccatcttgtgggttgctggtaaggtcttcccttggatttggatgggtgctgtcaccttggtctacggattgcccctctgaccccgttttggtctctctcttacccgccacgccctgcggcttagatatctctgcgactttacctactacacctctttgtaccagagtcacggtcgatcagccttcgtccacgtgcccccactggggaagccgtacaacgcggaccagctgggcagggcactgagagccatcattgaggagatgttggacctcctggagcagtcagagggcaaaatcaactattgccacaaacactgagggacgctcaggtctcctaagacctcatcctgctggggaccccacgaggggacatccaccctctggggtgtggccaggaaaagacaagctcttcagcttggggatccgatctggaagagagattctgatctgcccacctcctcttcctccttctctacaaaagctccggttgattcgagggaagtggtgaaaatttttttttctcccattttcctccctgcatctggggacacagctgccgtgaccagggaggccagcctgggaggtccagatgcccagggagaatcttggtctggtgaatccatgagctgcgataccacggctggggccatatgttcacctgctttcctgtccgttggtgaaggaatttcagaattcattttatatccaagactggcttttaccaaatttaaaagcctctcaatgcgtcctcgaccttgaactgtgctcaacagcctggccctttctggggccaccctgggatatggctggctggctggctttctttctttctttctttctttctttcttgctttctttctttcttgctttctttcttctctctctctctttttttttttttttaaatagtgctagtttgggcacagagtaatttatattccctttggttaaaatgcaggctttttagccaacaacaaaagtgttttccccccacccccactcgcccaccagggtgatgccacttttgcctcctgccctgaaaattggacttaagatgccatgtcttggccaggcgcagtggctcatgcctgtaatcccagcactttggaaggccagggtgggcggatcacctgagatcaggagttcaagatcagcctggccaacatggtgaaaccctgcctctactaaaaatacaaaaattagccgggcatggtgatgagtgcctgtagtcccagctactcgggaggctgaggctggagaatcgcttgaacttgggaggcagaggttgcagtgagctgagattgcacagctgcactccagcctgggtgacagagcgagactctgtctcaaaacaattggacttaagatggcatgtctttgttttagggccaaaaatgaggcccccttgcttaaggcatggggtccgtggccaggcaacggggtgggactgctgccccagatgtggccatgggggtcgtggtcctttcaacaccaagctatgagctgtcgccatggagaccagggccacctgtggaaaggcggattttgtctgcttttgacttttcttttttaatatgtaaaactccacatcagcggaaacccccccctacttctggcctggagcttcagggttttggtgctgggacgagtttgttgttctccttagcggggtggcgcggggggctcaaaacgggggcgcgggggctggagttggcagagctctgcatgtcccggcatgtctgagcaggaggaattccgggcggccaaagggttttatgtagattgcttttggacactcgcccaggagtcaggagttgatttttatctcacttcctggtaaccttgaacttaccaggcagggatgagatgacgtaaacttcctcagatgatgtaagttcagccacatcttgctgcccattagggagagaggacgacccccacagtgaaagtaattgagtgaaatgcacgttctggaaatcagtttctattttggcctggaggaatgtggctatactgcttccctgagtgtgacacagttggaatctaatcttgttggtttcccaacatctaggtttttgtttgtttgtttgtttttatgatagggtcttgttctgttgaccaggctggagtacagtagtgtgatcatggatcactgcagcctctacctcctgggctcaagtgatcctcccatctcagcctcctgagtagctgggactacaggcatgcaccaccacacctggctaatttttaaattttttatacagacagggtttcaccatgttgcccaggctggtctcgaactcctggactcaaactgatcctcctttctcggcctcccaaagtgctgggattacaggcatgagccactgcacccagcccagttctttcttaaaacagctgagagttttgttttcttcagcgttcaccttccttgtctccagttccgatgctggcagtggttcctacctctgttgggtttctagatagtttgggaacggggttgatgggtttctgtgaaacacattttccaagtcttgggctttctctggaggggaaggtggatgctggcgggtgacttgcagtgggcgcctggcagtgggtgtggactgtaactgacaggtggaaatgagtagggacactattgttccctccatgccagcttttttttttgctggaaatgccccctccacacccctggtagctctgtgtcctgagaaatccagagtgtgggagacatcactgcatctgtccccccagcttctgtgaagggaagctgtggcctcttttgaatgtggggaacaactgaagactcaggggtcacccagaggtctggtggaaagcaacttcaggtttcatcttgctctattcctcaaaggtctggtctgtgggcctctgaggagaaaacaggtctagccaagacagggacaaaatggggaaggggatgtgccaggcctgaactgagctaagcacctgccccgggctccacacttccatctttcttttgtcttcatttcacctctgtgtttaaagcactgtgtgacatagctccttagagatataacctattgtctgctcattgtcacgtgtgtgtgtgtcatctttgtattcttgcagtggtttcacatttccttacccagtcaagccagtatcccatccttcctcataatgcacaacatttggctcattttatttttctcattgttattttttatttttattttttgagatggattctcacactgttactcgggctagagtgcaatggcgtgatctcggctcactgcaacctccacctcctgggtttacacaattctcctgcctcagcctcccgagtagctgggattacaggcgcccgtcaccacacctggctaatttttgtatttttagtagagatgcagcttcaccatgttggccaggctggtcttgaaatcctgacctcaggtgatctgcctgccttggcctcccaaagtgctgggattacaggtgtgagctactgcgcctggccaagttttttacaaatatttttcttttggtggaactcatctgtgcactctctggtgtgtttttccacctttgttgggtcttggcttaaaatatcctcatgtgggctaggtgtggttactcacacctgtaatcctagcactttgggaggttgaggcaggagaatcccttgagccaggagttcaagaccagcctgggcaacatagcaagagatcccatatctaccaaaacatacaagaattagccagatgtggtggtgcatgcctgtggtcccagatactcaggaggctgaggcaggaggatcacctatgcctgggaggttgaagccccagtgagccatgatcacaccactgtagtccagcccgggtgacacagcaagactctgtctcaaaaaaaaaaaaaaaaaaaatcctcatgcaagaagggaaggaccaagtcccattccctcttgcctcattttcagagcctggggtaggggctacaggtggcataggaagggtctgcaaggtgggtgggacttggcaggtgttgggaagaggaataggggtggcaagtgtcaatggtgaaaagacaggctgaggggtgtggtgggaaggctgggggagaaaggtgagaagtgattgggggggcttccctgatgagtcctcatggagggtgctgaggcagggaacaggggtgcagggacagtgatcagggcacctggtaccctgaccaacttgatgatggcatctcttttaagatgcccaagtctgcgcacttttattcctttattcggcccctagcaccccctccccaccccaaagaaggtcagttgcatgcgtgtggggatgtagctcaaaaaagaaataagatggagtggaaaggaaagaaaggaagaagcaggaattcaaggtgggtgggctgagcttggggccacctagcccacctgctccaatcaagggctggaacaaacctgaggccacttggagaggcagggctgggcagggacagggggtgggggccgaaatcacagcttccccatcagagccagatgtgtgaaggaaatgtcccagatggcagtagtttctcggcaaggaggggaatcctggagatggttcatgtctgtgatcccagtgctttgggaggctgaggtgggaggattgcttgagcccgggagttcgagaccagccctgggcaacatggcgagaccccatctctacagaaattaaaaaaaaaaattagccagttgtggtgtcaagcacctgtagtcccagctacttgggaggctgagttgggaggcttatctgagcccaggaggtgaaggctgcaatgagccatgattacactactgtaccccagcctgggcaacagagcaagaccctgcctcaaaattaagaaaaaaaaaaggggggccaggcgcagtggcttatgcctgttatcccagcactttgggaggccaaggcagactgatcgcttgaggccaggagtttgcgaccagcctggccaacatagcaaaaccccatctctactaaaaatacaaaaattagtcaagagtggatggtgcgtgcctgtaatcccagctacctgggaggctgagacaggagaattgcttgaacctgggaggcagaggttgcagtggtgtgagatcacgccactgcattccagactgggcaacatagcaagactctgtcacaaaaaaaaaaaaaaaaaagaattccctgctctgcttttctgctcgttgctggcatagaaacatctagaacagaaagtatccactctggggcagatgggagagctggaaaagtagattcaagatgccttttagtcttggaagtttcttccaggaagcaagaccagctggtatgtttacacctgcactccagtgccctggggaggtgaccaggtggagggggatggctcatggaaatctgtcccgcacagctggcccccttttggctgccactgtctagactgttggcctttgacctctctgcctcttgtggcgtctgaacctagacgtcccttttggagacagctggacaaagccctattctccgcagccccagcctctatcctgaggcctctgggagctgcgtgacggccagcatggggtgctgatcatggtcaaggaggcaggtctttgccaggttgccccatgcagccacccatcctcagcatcctaacttgagggggcaggagagggctttgtttttataatccggattaaatttcccttccctgggcacaagtgcctcatgagggcccggggctgctggttgggagggaaagcatccccgtttttgcagtgaggaggccggccgagggctggggttccacttagacccttggcagaatggctgttgaggggcaggcgctgcccagtgcccacgtctggaaagctaattcccgggtggacgctgaacatacctgctgagagactctgtcccctggtttccaggacagttgtcacaagctgagtggggggggactcccaggacttgagggacccagtcccaccccaaactgctccccctcccccaaattccctttctcctcctgctctttctccccgctgtgcctcccccagttacccacagaagtgcctgcctctccagcgctcacagaacacacaaaaagggacaggaattggtcactgggtagtggccgtggctcctgacgatccagaccagcgtctggcccaagccattcagaggtggggtctggggcctgggggttttgtgtcgtgacactttgtctcaaggagattccacatagggatttgaattaggctttctgcttgccaaggcctgtggcatctgagcctggctgagggccgggcaagcctcccctgagcctttggaagccgagttcactctctgcctgcccaggggagcaccggcttggttctgggggctcctctaacatctcaggtttttatcttgtcttaaatttctttctaggaaaaaacccttccctgccaaaggtgactgtgttttctgccgccgaaggagggcccggtccctccaggctcagtgtggcttctccctgacccccgccctagaacttttgccagtgccttttctgaaactcctgtgtcccgggccccccaggcggagaaggatatgccggattctgcctggggctgggctctaggagaccccaaatttgacaccacagaaagcaaataaaacacttgaaatacgcatacatttcctgtgtgtccttttgtggggctggagttcagctgggtgcccggggatagaggggaccccgtgtcactgggtttctattctcggtggtgctgggcccagggcagctggtgaccatgtgctgagtgagcgagaggaggggaattctgcctccagtggtctccttcctcaaaatcagaggcctggcccagcgcagtggctcacacccggaatcccagcactttgggaggccgaggtgggtgaatcacctcaggtcaggagttccagaccagcctggccaacatggcgaaaccccgtctctactaaaaatacaaaaattagccaggtgtggtggcacgtgcctgtaatcccagctactcaggaggctgaggcaggagaatcgcttgaacccgggaggcggaggtcacagtgagccaagatcgcaccactgcactccagcctgggcaacagtgtgagactcagtctcaaaaaacaacaacaaaacccgcggacctttgttccaacacacagggaggttgaggaacttgcctgtggtaacacaggcactggggtttgagcgatgatctgcatcaacctccagggcatacaaaatccccatcatggctgggcacggaggctcacgcctgtaatcccagcactttgggaggctgaggccggtggatcacctgaggtcaggagttcaagaccaggctgaccaatatggtgaaaccctgtctccactaaaaatacaaaaattaggccaggcgcagtggctcacacctgtaatcccagcactttgggaggccgaggcgggcggatcacaaggtcaggagatcaagaccatcctggctaacacggtgaaacctcgtctctactaaaaaatacaaaaaattagccgggcacggtggcaggcacctgtaatcccagctacttgggaggctgaggcaggagaatggcgtgaacccaggaggcagagtttgcagtgaaccgagatcgcgccactgcactctggcctgggcaaaagagcgagactccacctcaaaaaaaaaaaaaaatacaaaaggtagctgggtgtggtggcaggcacctgtaatcccagctacttgggaggctgaggcagcagaatcacttgaacccggcgggtggaggtttccgtgagctgagatcacgccactgcactccagcctgggcgacagagcaaacaagactccacttcaaaaaaaacaaaaaatccccatcattctgacaggggatgccatgccattgccacctttacagacagggaaactgagtttccaccagttgaagccccttgtcccctatgtcacggccagggagagtaggggtgggaatgtgaacccaggcgggcttctctggagcggagggccttgaagaacacaaatggacatgttcattccctacgcctgtcctcagcaggaatgaagacaccctggtctctggctctctgagaataaacttttgacaccaaagggacttggacaacagttaggaagatgtcctggagcaagtggaccccgtgggttgggggaacttcttggactcacagaggactgagggttcttgcacccccagtggaggtattcatatctgggtggtctttcccatagggtcgactcttattattgttatttaatgtagagacagggtcttgccatattgcccaggctggtctcaaactcctgggcttaagttctctacctgcctcggcctcccaaagctctggaattccaggcatgagccaccatacccgtccctttgctgtcttgagccttagtttacccatttctcgtggggcttttgtggcaattcaatgagattctgcttttacagcccttaacttggagcctggtgccctgtcattgctcagtaaatacaatgatcagggtgtgggctctcgcttataatcccagcactttgggaggccaaggcgggtggatcacttgaggtcaggagttcgagaccagcctgggcaacatggtgagaccccccccccccatctctacaaaaaatacaaaaattagacaggtgcagtggcgcacacctgtagtcccagctactcaagaggctgaggtgggaggatcacctgagcctggggaggtcaaggctgcagtgagtggtgatcgtgccactgcactccagcctgagtgacagagtgagaccccatctcaaaaacaaaaacccggtcgggtgcggtggctcatgcctgtaatcccagcactttgggaggcaaaggcagatggatcatttgaggtcaggagtttgagaccagcctggccaacatggagaaaccccatgtctactaaaaatccaaaaattagccagccatggtggtaaacacctgtaatcccagctactcgggaggctgaggcaggagagtcgcttgaaccagggaggctgaggttgcagtgaactgagatcgcgccactgcactccagtctgggtgatagaatgagactccgtctcaaaaaaaaaaaaaccccacaaaataaatacagttaccatcacctcctcttccaggaagccctcctggctacctaggcatctcctctgactcctacagctgcctgggtgtccccattgtagcactctgggtggtaattgacagcctctgtgagagggtggatgggtatgtgtggggccccctctgtgtcttctgtgcccagcacagtgccagggacacagtagggaagcaataaactgctgggaggagaggtgagtgctgtgggtccactcctgaggccagccaggggctcagcaaggcaccaatgcctcctcccaggagtgaaagatgctggaatcaccaggctcctcctgcagtctggggtccccacctaaggaggcccctcaccccgtggctgtcccagtcattcaggaagtgtccactgtgggctgagccctggactggggacacagcaaggatcaggcagctgggagtacagcctggaggtccccccttgggatgagggctgcacaggcagttaaagggtccaaggatcatcccaggatatggctgagaggctgcaagaggctccatcccctagaggccccctccgccctcgcctgggtgctcccagccttactcaaaggagcaggtcggcccggtgcgttgtctcacacctgcaatcccagtgctttgggaggccgaggcaggcggatcacttgagcacaggagttccagaccagcctgggcaacatagcaagattctatctctacaaaagtaaaaataaatcttataaagtagctgtggactgggcacagtggctcacacctgtaatcccagcactttgggagaccaaggtgggcagatcacctgaagtcaggagtttgagaccagcctggccaacaaggtgaaaccccatctctactaaaaatacaaaaattagccaggcatggtggtacacatctgtaatcccagctactcaggaggctgaggcaggagaatcccttgaaactgggaagcagaagttgcagtgagctgagatcgtgccactgtactccagcctgggtgacagagtgagaccctgtatctaaaaaaataaaataaaaatgaaaagatgaggatcttggcctccattcttgcccttccactccattccaactgctgagcctctcacaccctctgtggctccctttcgcctacaggaaataggatttctgtactgggcatttgaaccccattcccttgtttctgctgacccccagcagtctcaatatcccctacttcctcttcccagaaccaccctccccaaagcccttatcgatgcttggaggattcctatgcatccctcaaaatccaaggtttgggaaagatgctgcagtggtctcaagacatcctcagtgtgatgacagcctggggtgggggtaagggggcaaagtacagcaccagaaatcccaactgagtccccccacacgtcttccaccttcccaccctctctttcgggttctggctccctgcctccaggcaatcaccagtttttaccaggagtgcctcagacctgcccggacatgtccaagtcccctagaagcagggaggggtgggtgaggctgtcacctctcccttccctgtatggtgctgataagggcgtggggaggcagagacaggcagagatagacatgatgagagacaggcagaaatggagggagagccagggagagagagacacaaagagaaaaagtggaaattctccagatattttgtttagggtgaggacacggagacacagagagggacttagccagctgaggatgacgatttgggatgttaggtcacccaggtgctgtgctgtgtaactcaggcacagagctgccctgttccgagcctcagtttacccctgtgactcagagcagatctccatacccccatcacagggctgtgtatccgagctcagccagagcctggcatgcagtaggtgcttcataaatacacactgtggacagtagaattatgatgggagcgagcgtgtgaactgggttgctaatgtggagcgtgaagagggaggcccagggttactcggccaatgggttccgggcagcaagcacgtgggggaagcctcagctgaccacttcctggccagtttatgcaggaactcgcacagccggtccctgaggctgagcccaccacttccgccccccatggtcccagccctgctgactcatactcagctgccacggtccgctttccctgctgagcacgggggtgggggcgggggggaagagggggagggaagggcacctgaccgaggccagaggcccagaaaggacagaaggtcatggctggggagaagcaggcaggagaaccgagtcttggccttaactggctggcaacgtaaaacctgccctccacaaggacaagatgaaaacttggggatttggaggggacaacaaattagactcaatcacaatttcaaacttttggatgtcaatatatccatcaagaaattgaaaagaggcctggcatggtggccgatgcctgtcatcccagcactttgggagaccaacgtcggaggatcacttgaggtcaggagttccagaccagcctgggcaacgtggtgagacccggtctctacaaaaaaatttaaaaattagctggacaggggccaggcgcagtggcttacgcctgcaatcccatcactttgggaggccgaggcctggatgacagtgagagactctgtctaaaaaaaaaaggacaggtgcggtgcttcgcgcctgtaatcccaacactttgggaggccaaggcagatggatcacctgaggtcaggagttcgaaaccagcctggccaacatggtgaaaccccatctctactaaaaatacaaaaattagccaggtgtggtggcgcatgcctgtcgtcccagctacttgggaggctgaggcaggagaatcacttgaacccgggaggcagaggttgcagtgagccgagatcgtgccattgcactccaggctaggtgacagacagaaactcttgtctcaaaaaaaaaaaaaaaaaaaaacccaccagagataaaaatgggcagcagatgacattgtttacataatactgaccacaaacttgatgtcctaaaagaacagggacttctctcagagttctggaagccagaagtccgaaatcaaggtgtcacagcaggactggttccttctggaggctgtcaggactcagaatgtgatactccaaagtatggctccttggcaaaaactttgtggtttttgtttttagagacagggtcttgctctgtcacccaggctggggtgcagtggtacaatgatagctcactgcagcctctacctcctgggctcaagcaatcctcccacctcagcctcccaagtagctgggactacaggcatgcgccaccacacctggctaattacttttatttttgtagagatgaggtctcgccgtgttgcccaggctggtgtcaaacttcttcttcttcattttttgtttttgagatggaatctcgctctgttgcccaggctggagtgcaatggtgtgatcttggctcacagcaacttccgccttctgggttcaagtgattctcctgcctcagcctcccgagtagctggaattacaggcatgtaccaccgtgcctggctaattttgtgtttttagtagagacggggtttctccatgttggtcaggctggtcttgagctcctgacctcaggggatccacctgcctcagcctcccaaagtgctaggattacaggcgtgagccaccgcgcccagcgaagacagttattttaaagtatttgtctagtgagtctgatgtgtgggcttccttagggatggtttctgtctgttaattttgttccttaaaatgcgccacactttgctgtttctctgtatgcctagtgatgtttttgttgttgaaaagcgagcatttgaatattctaaattatggtaactccagaaatcagattctccaccttcctgagagttttgtgatttttgtttctgtttttaattatggaaggcagtagccatctctttgtttagatagttttccaaaccgcttttttttttttttttgcaaagactgtattccggccgggcccggtggctcacgcctgtaatcccagcactttgggagtccgaggcaggtggatcacgaggtccggagatcgagaccatcctggctaaaacggcaaaacccccctctctactaaaaatacaaaaaattaggtgggcatggtggcgggcacctgtagtcccagctactcgggaggctgaggcaggagaatggcgtgaacccgggaggcggagcttgcagtgagctgagatcgtgccacggcactccagcctgggcgacagagcgagaccctgtctcaaaaaaaaaataaaataaataaaataaataaataaataaataaacctgttccccaaatatatatatgaaattaaaacatgcgtggtcatgatcaagttctaattacagacaaagacttccttgagattggggagaacctgccttggactacggggaccacttcaactctcttgggaatgatttttctttaggtgggtgctggataggggtgtttgtgattttattattaatacttttgtgtgtgcctgaaagatttcacaatgacaaataaaactgagaggaaaaggtttggcagttccccattaagttcaatacagggttactctgtgacccagtaattccactcctcagtagagagccaagtgaaatgaaaacaggtgttcaaacaaaaacgtgtacacccacttttacagcagcattcttcatcaaggcgaaactacagtacaaatattgtaagattccatttctgtgaaatgttccgaataggtaaatctataaaggcagaaattaggccaggtgcagaggctcatgcctgtaatcccagcactttgggaagccgaggtgacaggatcgctggaggttaggatttgaagaccagcctgggcaacatagcgagatcccatctttacaaatttttttaaaaattagcaaggcactggctgggtgaagtggctcacgcctgtaatcccagcactttgggaggccgaggcgggtggatcacctgaggtccggagttcgagatcagcctgggcaacacggtgaaacccccgtctctactaaaaattcaaaaattagctgggcatggtggtgcatgcctgtaatcccagctactcgggaggctaaggcaggagaatcgtttgaacccaggaggtggagactgcagtgagtcgagatggcgccattgcactccagcctgggcaacaagagtaaatctccatctcacaaaaaaaaaaaaaaaaaaaaagcaaggcacagtggcatcaggctggggtgggaagatcacttgagcccagccattcgagaccaacctgtgcaacacaggaaaaccccattctacaaaatagtaaaaaattatcagggcatggtggcacatgcctatagtcccagctactcgggagagtgatgggggaggatcacttgagcccaggaggtcgaggctgcggtgacctatgattgtgccactgcactccagcctgggctacacagccagaccctgtctaaaaagaaacaaaacaggcaggacgcggtggctcacacctgtaatcccagcactttgggaggccgaggtgggcggatcacctgacatcaggagttcgagaccagcctgtccaacatcgtgaaatccccctctctactaaaatacaaacattagccgggcatggtagtgggtgcctgtaatcctacctactcgggaggctgaggcaggaaaattgcttgaacctgggagatggaggttgcaatgagccgagatcgcgccactgcacgacagcctaggcgacagagcaagactccatctcaaaaaaaaaagaaaaagaaaaaaagaagaaactctcattgatggagtgttcattgatggagcactttttgggagtgggttgacatgctcacaggtgtttttaacctcacctcgtctctgaagaggtgcagataaaagtcacctggtgaggaaaatgcctttttaaaaacaatttttagagggccagcacggtgactcacgactgtaatctgagcaatttgggaggccgaggtgggcggatcacttgaggtcaggagttcaaaaccagtctggccaacatggtgaaatcctgtctctactaaaaatacaaaaattagttgggcatggtggcacatgcctgtaatcccagctactcgggaagctgaggcaggagaatcactttaacccaggaggtggaagttgcagtgagccaagatcgcgccagtgcactccagcctgggcaacagagcgagactctgtctcaaaagaaaaaaaaaagagatggggtcttggggtctcactgtgttgcccaggctggtctccaactcctggcctcaagcaatcctcctgctttggcctcccaaagtgctaggattacatgcctgagccactgtgttcagccagggtgtcccttttctgagactgcattctttccaccttgcccaagtattgcaggagaaccacaggccccatgctgtgctggcgaaaatctcatctcatgctggcctgttagggtggccatatcctctcatttcagaggctctgagggagatggaacaggctcagcggctggctgcttggggctctaaccccagccctgctgtcttctggctgtgtggccgtgacgagcccacctctctggcctcagtttgtcatctgtgaaatggacataatctatccaccacatcaggctgtataaagattaggccaggtgtggtgcctcacacctgtaatcccagcgctttgggaggctgaggcaggcagatcacctaaggtcaggagttcgagaccaacctggccaaaatggtgaaaccctgtctctaataaaaatacaaaaattagctgggcatggtggcatgtacctgtaatcccagctacccaggaggctgaggcaggagaatcgctggaacccgggaggcagaggctgcagtgagccaagattgcaccactgcactccagcctgagtgacagagcgaaactccgtctcagagaaaaaaaaaaaaaaaaaagatatgtccaagtcctaacgctcagtatctgtgaccttatttggaaagaaggtctttgcaaatgtaattaaactaaagatcttgtactgagatcattctgaattaagaatggacctgtggctgggcacagtggctcacacctgtaatcccagcactctgggaggctgaggtgggcagatcacctgagatcaggagttcaaaaccagcctggccaacatggcgaaaccccgtctctactaaaaatacaaaaaaaaattagctgggcgttgtggtgcacacctgtaattccagctactcgggaggctgaggcaggagaatcacttgaacctgggaggctgcagtgagccgagattgcgccactgcattccagcctaggcaacaagagtgaaactctgtctcgaaaataaaaacataaaaagagtggacccatggccaggcacagtggctcatgcctataatcccaacactttgggaggccaagatggaaggatcgtttgaactcagccgtttgagaccagcctgggcaacatagtgagacccctgtgtctaaatacaaacacaaacagaaaacaaaaagaacccgggctggctgcggaaccccctagatggcacaggcacatcctggctttcgaggacagtcacgagcatgagacagcatttcttcttgtcctcggggcctgcaggaagtttttaagtaatctgcttttgtgcctcttccaaatctcctcctatgaccctgtttaccttacatcacaagaaacaatcaataaaagtggtttgtgttcgtgagtgccgtgtgtttgacaaaggcgttgataactgagagctggtagtggaggggggagattttgggagattggggccctgccaggtggacggactggcctgacctccggcccctgtgctctgtttacttccatcccagctccacctctggggacccatggaagctgtcggtgaggaacacaggatccgacctgctgagctcatctctggccacctgcctgcatccgccccatctctcctctcagcttggccatgaggcgggctatgaggtcattggttaaagatttggggaagcagagccaggcgagtggccagatgtggtggctcatgccatcacaggatcccagcactgtgagaggacaaggaaggaggatgcttgagctcaggagttcgagaccagcctgtacaacatagcaagacccccgtctctacaaaatataaaattagccagttgtggtggcacgcgcctctagtcccagctactcgggaggttgaggtgacaggatcccttgagcccaggaggtcgaggctgcagtgagtgggtaacagagccaaaccctgtctctaaaacaaacaaaaacagaaacaaaaagtacactacttactgtcctgcttctcaccattccagcctggtagtccttttttttttttttgagacagggtcttgctcagttgctcaggctggagtgcagaagcgtaatcacagctcactgcagccttgatctccaaaaagactaccagcttggctgggtgtggggactcatgcctataaccccagcattttgggagccagaggcaagaggattccttgagccaaggagttcgagaccagcctgggcaacacagtgagaccctatctctaaaattttttttttttgagatggaatttagctctcgttgcccaggctagagtgcaatggtgcaatctcagctcaccacaatctccacctcccaggttcaagcaaaattctcctgcctcagcctcccgagtagctgggattacaggcatgcgccaccatgcccggctaattttgtatttttagaagagacggggtttctccatgttggtcaggctggtctcaaactcccaacctcaggtgatctgcctgccttggcctcccaaggtgctggaattacagacatgagccaccgtgcccagcctaaaaaaaatttttttaaaaaatagctgagtgtggtggcacatgcctatagtcccagctacccaggaggctgaggtgggaggattgcttgagcccagcagatcaaggctgtagtgagccaagattgtgccactgcactccagcctgggcaactgagcgagaccctgtctcaaaaaaaaaagaaaaaggaaaaagaaaaagaaaaaaaaaggactaccaggtgttttttttttttttttttttttgagacggagtctcgctctgtcgcccaggctggagtgcagtggcgcaatctcggctcactgcaagctccgcctcccgagttctcgcctttctcccacctcagcctcccgagtagctgagactacaggcacccaccaccatgcctggctaatttttttgtatttttagtagagagggggtttcaccgtgttagccaggatggtcttgatctcctgacctcgtgatccgcctgacctcggccttccaaagtgctgggattacaggcacgagccaccgcgcccagcctggtgtccttatttcttgggaaaggatacagagggtcagagaggcgccccagcttgtgcaggaatgcattcctgagatctggcctggccgtggtcactggagtgtttactctgcttacagggtctggtgtagtgggggatggctgggtaggaacgtgcgggctataaagccagaccccaggtgtcagtgcggttcagaaagcaactagcacagccatgcccaggccaggacccgtgacacagcgatgctctcagatgctgctgatgttacagatgttgttgggggcaccctgagggggcaccctgactctgcaggtgagaaccttctggggttcctaggaccctcggacaagcactctgatccggatgactccaggtcccaggagttgcagaaacgccaccaggaccttcagagcaccagttagacaaggagagccaggaggagctgggccccaacctcatccaaaagcacaggtgagctctgagacctccacccccaggacagcccccacgtctattttctttttctttaaagatgttcttatttgggggccaggcgtggtggctcatgcctgtaatcccagcactttgggaggccgaggcaggcggatcacctgagatcaggagttcgagaccagactggccaacatgacagggtgagaccccatctttacaacaaatacaaaaattacccaggcatggtggcacacgcctgtaatcccagctactagggaggatgaagcaggagaattgcttgaacccgggaggcggagattgtagtgagttgagatcgcacaactgcactccagcctgggcaacagagcgagactccaatccaaaaaaaagaaaaaaatcccctaggacagggctgtggctgagaccctgagggctggaggcttggctggccttgcacagcagcgggtgcatgctggggtggggagaggcctggagaccctgtgactccactgggggccttgctgtgtgaccccctagtgagtccttgtgtctcttacccacgcatgcctgtcacatgcagacacccacacacacccagtatctgccggacagggcagcccttcctctccgcagccaggaagctggacataggcacaagggctgacgcctggggccaggaatcctgcctgagcattaggagaaggtctggaaccccagggggaagggcactcctggggcatcccctgcccctctaccatctggtggctggactctacaccagcctgccctgctctaaaaccccagctcctcaattctgtgccacctcctctctgggcccagacaagagcagattcatccctgccccaaaggaaccaccagtcttgggtcagcagagctgggcacagacacttccagtgccgtggggctgtaactgtgataggtctgttgctccatgcacttggcaagtcaacagctgagaaaacaggttgcaacatggaaagagttttaatccgaccggcgtggtggctcatgcctgtaatcccagcactttgggaggctgaggcgggtggatcatctgaggccagcagttcaagatcagcctggccaaccaggtgaaacctcatctctactaaaaatacaaaaattagccaggcgtgatggtgcgcacctgtaatcccagctacttgggaggctgaggcaggagaatcaattgaacctgggaggcggaggttgcagtgagccaagatcataccactgcactccagcctgggcaacagagcgagagactgtctcggaagaaaaaaaaaaaaaaaaaggctgggggcagtggctcatgcctgtaatccccacactttagaggcagaggccgacggatgacttgaggtcaagagttcgagacctgcctggccaacatggtgaatcaccgtctctactaaaaacacaaaaattagccaggtgtggtggcgcatgactgtaatcccagctactcagtaggctgaggcaggaggcggaggttgcagtgagccgagattgtgccactgcactccaacctgggggacagagagaaactccgtctcaaaaaaaaaaaaaaaaagagatttaatcctagggccacccaatgaggagataggagggaacctcaaatccatttccaggaggaggagtttggggccatataaatgtatatatacaaatatatatatttttttaagatggagtcagccggccgtggtggctcacgcctctaatcccagtactttgggaggccgaggccagcggatcacaaggtcaggagattgagaccatcctagctaacacggtgaaaccccatctctactaaaaatacaaaaaaaaattagccaggcgtggtggggggtgctcatagtcccagctactcaggaggctgaggcaggagaatagcatgaacctgggagctggagcttgcaggttggagtgcaatggcatgatctcagctcactgcaacctccgcctcctgggttcaagcgattctcctgcctcaggctcccgagcagctgggattacaggcatgtgccaccacgaccggttaatttctgaaattttttagtagagacagggtttcatcatgttggtcaggctggtctcgaactcctgacctcaggtgatccgcccgccttggcctcccaaagtgctgggattacaggcgtgagccactgcacctggccaggggctagagttttaatttttaaggattttggagtgggctgaagtgtggaggtcattgcttggtgaaagagtgcaggaggtgaagtcacagacagtaagaaactgtattctcatgcagattccgttcctctgtggggtcttcacactggtgggtgtcattggttaaggatttcaaaaacatcttaagaaattcttctaaaaagtcttatgattctaaggtcggaaatcacatctatagcaaatggtcggtatcaggtgctacaagcaacttgcggtcacaaggaagtgggtcaaagtgcagcctgattagtgcttaattataactaagtttctgtccagaattctttttttttgagacagagttttgctcttgttgatcaggcggaagtgcaatggtgaaaacttggctcactgcaacctccgccctctgggttcaagcgattctcttgcttcagcctctcgagtagctgggattacaggcatgtaatcccaccaccaagcccagctaattttgtatatttagtagagacagggtttctccatgttggtcaggctagtctagaactcttgacgtcagatgatccacgtgcctcggcctcccaaagtgctgggattacaggcgagagccaccgtgcccggcgcagaattcttttttttagagatgaggtattgccatcttgcccagacttgtctcgaactcctgggctcaaacaatccacccacctcggcctcccaaagtgctgagattactgacataagccaccatgcctggcccccagaattatgaatcctgtgaggatggcttcaaggtgagcgctgagccagacaaaaggatggggtttgggagcaccctgcttagactggaaagataatgttggagaagacttcctggaagaggggctttttgcgtagagttttgaagaatgagtaggagttctccagaggaggatgagtaactgcaataacacccagtttatcaagtgcctcctatgtgtctggccctgtgctttacccctcatttgaccacctctccagtgagagtctcagtcctttttttcctggtgaggaaacaggcatggcagagaggcatgacacatcaaggttgcccttcctggctccatctagcccgttctcctctgcttcctttgtttttcaccatctttagcctttgaccccaaccaaaaagagaagagaggaaatcccatgggcatagacagccacctcttaaactcttgtctggaatttttcacatagtaacaatgtctttttttcctccaaaaagactcccaggctggaatggtgtcctcatatcgaggaagaggatactgaggcccagaaatgtgccctagctttactaggagcgcccccacctaaagatcctccccctaaatacacccccagaccccgcccagctgtggtcattggagtgtttactctgcaggcagggggaggagggcgggactgagcaggcggagacggacaaagtccggggactataaaggccggtccggcagcatctggtcagtcccagctcagagccgcaacctgcacagccatgcccgggcaagaactcaggacggtgaatggctctcagatgctcctggtgttgctggtgctctcgtggctgccgcatgggggcgccctgtctctggccgaggcgagccgcgcaagtttcccgggaccctcagagttgcactccgaagactccagattccgagagttgcggaaacgctacgaggacctgctaaccaggctgcgggccaaccagagctgggaagattcgaacaccgacctcgtcccggcccctgcagtccggatactcacgccagaaggtaagtgaaatcttagagatcccctcccaccccccaagcagcccccatatctaatcagggattcctcatcttgaaaagcccagacctacctttgagcctcagttgccccatctgtgccctgggtaggaatatcctggatccccttgggtctgatggggtagccgatgcctgatttgcacccacaacgtgggaggttataacctgtccccaagttgcaaatggggaaactgaggtacagggatgccagggaccctcctgaatgtgcacagcacctgggaaacccggggacggggtcgggcgtgcggtgtgggcatggtccctgacctgggctggggccaggatccaagagaaacaatgggggtgtggtgcatggatagaagtttgtgatgggcagagccagctggagctggttctgaatctgatgaaatcgcttgtcaaggcactgctaaagtcacatgcaacgagcgacttgttaggggaggaggagagtattttccccatctctgtgccctccatggaggctccaggggtgcagggcactggatgaggtctgggctgtggtgggacccaggagggggcaggcagaggggcacactcttagcccgccctaaacccatctgtgccgtgtgactccggcaaacctctcacccttgctaagcctagcaactaggttaaggcaccctcaaaccccagtctccccagtctccctaacacttgtaccagcctgaggggctgtgattcctagaggctcagtagtctggaatgtgatgggtttggcactcttcatttctcgggattacacctgtaatcccagcactttaggaggccaaggtgggagcatcgctttaggccagaacattgcagcctgggcagtatagcgagaatccatctctaccaaaaatgtttaaaaaaaattagccagacatgatggtgtgtgcctgtagtctcagttattcaggaggctgaggcgggaggagcacttgaatccaggagattgaggctgcactgagccatgagtgccccactgcactccagcctgggtaacagcaagaccataataaataaataaataagtgaagcaagtaagtttttgactgccagaagaaaagcagagccatggttggaatctcaggctgcctgaatatcagatatacattaattccttcaagtatttactaagcacctattgtgtgccaggcacagtgtcaaccaagctaagattctaagtagggaatatgaatgatacacaaggaaataaaatagggtgcttcctattttaggcaggctggaaggaagaggaggagccagccatactgagattcaggagattcaaggggagaaatgcccttttttttttttttttttttttttttgagagggagtcttcctctgttgcccaggctggagtgcagtggcacgatcttggctcactgcaacctccaccgccccgattcaagccattcttctgcctcagcctcccgagtagctgggatcacaggcgccagccaccatgcccagctaatttttggtatttttagtagaagcgggcgtttcaccatattggccacatatcggccaggctggtcttgaactcctgacctcaagtgatccacctgcatcggcctcccaaagtgctgggattacaggcgtgagccaccgcgcccgcacggagaaatgctcttggtaggggaaataacttgtgcaaaggcgccgccgccgtggtgagatccagcttggcgtgttaggggaaatgggcaccctcgttcctggaaaacggtaggcctgtgggtgaccagcttccctatctgtcttcccacagtgcggctgggatccggcggccacctgcacctgcgtatctctcgggccgcccttcccgaggggctccccgaggcctcccgccttcaccgggctctgttccggctgtccccgacggcgtcaaggtcgtgggacgtgacacgaccgctgcggcgtcagctcagccttgcaagaccccaggcgcccgcgctgcacctgcgactgtcgccgccgccgtcgcagtcggaccaactgctggcagaatcttcgtccgcacggccccagctggagttgcacttgcggccgcaagccgccagggggcgccgcagagcgcgtgcgcgcaacggggaccactgtccgctcgggcccgggcgttgctgccgtctgcacacggtccgcgcgtcgctggaagacctgggctgggccgattgggtgctgtcgccacgggaggtgcaagtgaccatgtgcatcggcgcgtgcccgagccagttccgggcggcaaacatgcacgcgcagatcaagacgagcctgcaccgcctgaagcccgacacggtgccagcgccctgctgcgtgcccgccagctacaatcccatggtgctcattcaaaagaccgacaccggggtgtcgctccagacctatgatgacttgttagccaaagactgccactgcatatgagcagtcctggtccttccactgtgcacctgcgcggaggacgcgacctcagttgtcctgccctgtggaatgggctcaaggttcctgagacacccgattcctgcccaaacagctgtatttatataagtctgttatttattattaatttattggggtgaccttcttggggactcgggggctggtctgatggaactgtgtatttatttaaaactctggtgataaaaataaagctgtctgaactgttccctgtggtgtccaggataagggaaggtgaccttgagaagatcctcctctccctgacctcagtttctctaggagacctgggagggggtaagtggaaaggctcaaggaatgagtggcaaggtgttctcggagatgccaagccattggaaggtgcttacgacacctgtgggctctaagggcagccttggccattcctgactccctgactctctgtctctatttctctatctccttattgctgtttcttttttctttttattttttttagacggggtctcactctgttgcccaggccgaagtgcagtggcacaatcacagctcactgcagcctcaaccacccgggctcaatcgatcctcccacctcagccacctgagtagctgggactacaagtgcatgccatcatgcccaactaacttttgtattttttgtagaggctgagtttcgccatgttgcccaggctggtgtttctgttttggaaacagctgagaccccatacctttttaagtctcagcttccctccatctttcctcattcctcaaaacttctctctttggggtctgaggcagaggatctgtctctgtctttgtctctatcaccatcctgttgctctccccacttgggagtcacctttccaaacacaggcagctcagagccaagtctatctgcaaccaagtgccttgttttgtggtactgtccccaacctgaggggttagtcccatcacccctcctgtttgtggcacttccatgttagtgacacctcattctttcacatataaagagtagggagaaacaaataagttgtgaagaatattttcatgcacaccacatctcccaggttatatatacttcctgtttaggatgttggaattttgaggtgtgctgagtccagccccctctccacaccaaactgcctgcccatcctgaatctctgagaggaatggcgatgggtgtcttgagggacagagtacccacttccagcagtgaggtgtatctgctgggaatgccatcacccacaggccaacctgaatgactgcaggttccccttaacgtattcagtgagtgcccactttatgccaggccccggacacagctgtaaaaagacacacaaggaccaccccactttgcggagcctggttgagtgaaggggacaaatgagtaaatcctaagaaagtagttgattgcagtaagatttgtgctggggattcaacccatcagttcattagtgaacggaggcagaggtgatctagatagttggatggggaggcctccctggggagggaggtcacatttgagctgagacctggaggaagaaaaggagtcggggagggggtagttgagggtggacattgcaagtaaatgcaaacagcaagtgcaaaggccctgagatgggagcaggctcacttcagtcacagcaaagctgttgaaaatgggcacctaggaggcttcaaaattaaactcaataccaaaaggcagcagatggtgtcactgagtctttccccaaacaacagctgttgcctttgcaaggtatagggctgggcctgtgccttctctgtgcttctccaggctcttgcacaagttggtccacccagccagcatgccctttcctctccaattctcaaactcctatgcatccttcaaaacccactgcagattcccctcttacatgcagccttattcaaactcattcaattgtctccatgtggggactgtgctcccattcttccctttggcccaggcttgatctcccaggactgagggtacttgtctctagttctatctcccccaggttggaggattgggctgggaccagctgataggaaacccagttgaggcatgagcctgaaaaaactcttgaaatacagacatctgtgagtcattaactctgcctgagaagaaaccagggacagcttctcaaaggaggtggcattgcaccagggtcttgaaagattttctcagaatattagagctaaaggaatatatacatttttttattttggggttggtgtgggctgctctggaggccaagcctggagatcagggacctgggaaggggccctgagaggggcagaagggaggaatgtgcctgggcgcagtggccacgcctgtaatcccagcacttcaggaggccgaggcgggcagatcgcttgaggtcaggagttcgagaccagcctggccaacatggcgaaaccccatctctattataaatacaaaaattagctcggcatggtggcgggtgctgtaatcccagctactcaggaggctgaggcaggagaatcacttgaacccaggaggcggaggttgcagtgagctgagaccgcagcattgcactccagcctgggtgacagagtgacactcagtttcaaaaacaaacaaacaaacaacaacaacaaaaaaaaacagggatgggaggtggggagcaatttgggagtctcagatggagacttggtcttagaactcagaaatccccaccttgaggaacccacgcaccctgagccagcagcctcatcagcctcgaagcatttattgagcactgcctgtacatccacaggagggtgatgacaggattggcacagtgaccgtcctgtccccttgttgggggtctctcctcttccccctctaggagctgagggagctgaggagcggcatgagggacagggagggggcggcagagcttcctggggcctcaaggacaatcctttcctgtacccattcttcagatggggaaactgaggccatggaggcgttaggacgccctgagtcacccagcagggactgaaggggttctgggtggaggttaggacatcttaggctcagtgcccggggatcacgtactcctcttcatccattggggcctggcccagtgactgcaggttacagtagacaggctgggaagccaggtcgatgtccttgtagttgatgtaaaagtcattgtcctctgaagggtgagccctggggggacagacagaccaggggtaagtgtgggagggggaggactcaggggacaggcacatgagctttgagaaagtccagagtgggccaggtgctctgactcacgcctgtaatccagcactttgggaggctgaggtgggtggatcacctgagatcatgagttcaagaccagcctggacaacatgatgaaacctcgtctctactaaaaatacaaaaattatccaggcatggtggcacaggcctgtagtcccagctactcgggagtctgaggcaggagaatcacttgaacccaggaggtagaggttgtagtgagccgagatcgtgccattgcacttcagcctgggagacagagcaagactctatctcagaaggaaaaaaaaaaagaaagcttcagagtggctcagtccaccccgaatatttacatatggggaaactggcacgggctagcgttctgactcctagccaaccccacctctctctgaggaggctgcgggagggcagtgatttagggaaggttctgtgggtgtaacgctgcggtctgaggaccctgaaccctttttccttccttaaaaatgagatagcggccaggcgcggtgactcatgcctgtaatcccagcactttgggaggccaaggcagaaggtctgcttgaggccaggagtttgagaccatcctgagcaacagggtgagaccccatctctacaaaaaattaaaaaattattcaggcgtggtgacgtgtgcctggagtcccatctcctcgggaggctgaggtgggaggaccgcttgagcccaggaggtcgagcctacagtgagccgttatcacaccactgcactgcagcctggatgacagagggagaccccgtctcaaaaaaaacagaaattgaggtagctgttcattattacattaaaatctaaatttttgtttcctcttgaaaaatcggaagctctggccacgtcagtcacatgcacacaagtggctgcacccacactctgtgctccttccgatgggaaatgttttcaccactgaagcaactgactttgtggccctcatatataaaagcaagtctctgagcctcagtttctgcatctatagaattggtcaaggagcaggtagctacttaggaatatttgttatggtcagcaagacctccagagaattttcctgcctcctgaacattctaattccaacccagctcctcttgtaaaaagggccactgggccaggtgcggtggctcacgcctataatcccagcactttgagaggccaaggtgggcagatcacctgaggtcaggagttcaagaccagcctggccaacatggcaaaaccccgtctctactaaaattagccgggtgtgatggtgggcgcctgtaatcccagctactcgggaggctgaggcaggaggcaggagaatcacttgaacccgggaggtgaaggttgcagtgagccgagatcatgccattgcactctagcctgggcgacagagcgggaaaaaaaaaaaggcaaaagggctactttgtgttaacagcatctatcagtcaattatactctagtacgaattgcccaccaacccctaagtggttgtagggggacgaacaggtctgggacgcagggtttgtgtcctgccttttttgactggctatgtgaccttggacaagtcatttccctgcctcccagagcctccatgtctgtaactgtaagatgcagggtggaaatgacacagtcaattctaaacacagtgtttctggaggccagtacataaaggaggctgatccggaagcctcggggacagggaggccaagatgaacatcagagcacaagctgcttttgcgagtccagtgtcttcaacaccctgcctcagaccatttctgcttttgagccatgttgacatctgctttgcatattttctcctttctcaccaacagccttccgatagcctccccacctcctggcacggactctgctgcccaaacacagccatggccgcggccccttcctgcttggccctccctgttcccctcaggcctcagctttcaagtcatcccttctcaaaaaccattcacagcaaattctctgttctttcccacctctgggtctctgcccctgagggtcccaccccttgaaattccctccattcccttttccaacctagaaaagcttttcttttctttttttctttctttctttctttttttttttttttgagacggagtctcgctctgtcgcccaggctggggtgcagtggtgcgatctgggctcactgcaacctccacctcctgggttcaagtgattcttcttgcctcagcctcccaagtagctgggattacaggcacccacgaccatgcccggctaatttttgtatttttagtagagacagggtttcaccatattggccaggctggtctcgaactcctgacctcgtgatcctcctgccttggcctcccaaagtgttgggattacaggcatgagccaccgtgcccggcctaatttttgtattttttagtagaaacagggttccaccatgttggtcaggctggtcttgaggtcctgaccacaggtgatctgacctcgccttggcctcgaaaagtgctgggattataggcatgagccaccgcaccccacaccaacctagaaaagttcaactcatttgtctaagcccagcaaaatcatccagaagccggtggcggtggctcacacccataatgccagcactttgggaggctaagacatgaggatcacttgaggccaagagtttgagaccagcctgagaaatatagcaagacccccgtctctatgaaaaatacaaaaattagttgggtgcggcggcatgtgcctgtggtcccaactactctggagactgaggcaggaggatcacttgaggccaggagcttgaggctgcagtgatctgtgatggtgccactgcactccagccagggcgacagaatgacactgtctcaaaaaaaaatgtcggctgggcgcggtggctcacacctgtaatcccagcacttaaggaggctgaggtgggcggatcacgaggtcaggagatcgagaccatcctggctaacacggtgaaaccccgtctctactaaaaatacaaaaaattagcctggcgtggtggcgggcgcctgtagtcccagctactcgggaggctgaggcaggagaatggcatgaacccgggaggcggagctggcagtgagccgagatcgtgtcactacactctagcctggatgacagggccagactccatctcaaaaaaaaaaaaaaaaaaatcatctagtggtgatgggactttgtagggcacctctttagtatctcatgtgtgtcatggggaaatggggggctgtccccactctatggagacagaaatggaggttcagagacagccttgggtcacatgggacctgggcctatgctgctgaccgccaccgcggagccccaactccgctcaagcagttgcctcctgtctccccatccttggccgccagaaactgggtttacaggtcataagggggggaagtttgtcccatatatgggaactcacttaattcttaccccaacacactatgatgggggctgtaattctccctcattttactttattttattgattttatttttgagatggagtctcactctgtcacccaggctggagtgcaatggcatgaacttggctcactgcaacctctgactcccaggttcaagagattctcttgcctcagcctcctcagtagctggaaccacaggcgcccgccaccacacctggctaatttttgtatttttagtacagactgggtttcaccgtgttggccaggctggtctcaaactcctgacttcaagtgatccgcctgccttggcctcccaaagtgctaggattacaggtgtgagccaccatgtccagtcctctccccattttataggtgaggagactgaggctcagagaagtaaagctactcacctaagatcccacagccttcaagcggcagagctgggatttgaacctcggccatctgggtgtggagccttattattcaccactttggcaggtgtctcagtggcttacttacccttgttcatcccactggtgctcggctgctggctggcccacaaacatgttctcatagtcgggagtggaggggcaggatggcacggccacttggggcttgggggcgctccggctgccgtaccgtggctgcaagcctaaaccgggcttgggcccatcctgagcagcccagggtttgttcagctcccggcttctggccactcggcatcgccagagtctccaggccagcacagggccagcgatggcaagtccaagaagcaggcacccgctgaccaccactgccccgatagttgcagaggccaggccaggggcgcagctgacctccaggaaggcagagaggttgtgctgggagctggttgtgtcccagcagagcagaggcttctggccagagcagttgtctcggcggatgtcgtgccaggactccagggcacagttgcagtcggcctgcaggtcaaggtcacagcgggcggccagcgccccatccacacgagacaaggggttgcgtagcacgttcaggacctcaagcttctgcaggtgggcaaagaaggtcactggaagctctcgcaggccgttcccagacaggtcaaggagaatcacgttgctggcccgcagagactggttgtgaggcaggctcaggctgaggccactgaaattcaggcacgtggcactgaactccgcgttccagtccacatccgcggaggacacggtgcacgacggttctaggctgtctgactcccgcagcagcagcggcaacagcagcgtccatgccagggtgccccccattcaagcaacctacgtagagacaccggaatcctagccctgacctcagccctgtggtcgccctcgcctccaccgccagtgtttattattatagctcagaccagctcaagccgcttctgaaatggtaaaacgcagccccagtctggtcgcctcctttggctggtgggctgcctcagtctccccttctggggaatgggtagataaccccagtgcttagcgggcttggaaggcgaggaggagatccgggccagttaaccccttcttctatgtcctgaacatttggggcgccctcgttggccaggacgggaccctatgcaaataagcggttgccttggaaacggccccgccccctgatcacgctcccggtatctcccagaacggcgggtcgctgggaagtcctgggatagggtggagtgggggctgctgaaagggtcctcccaggtctggtttgcagtccctgcacaggtgcaagttctagagcctcagtcctaccttttgggtcccactgccacgcttttgcctctgcgatgctggaaaagcgacggcgcccagaggctgcgtcctggcccacctggacacgggggccgcagcggccacggccagcaccgtccgcagcgctgctggggtcgctggcgttcctctggctctgcacccagcgactcagggggaagaggaactggtgtctgggtggagtgcagaggggaagaatgaagacagagatccgcccccttgcagggcctcaaggttctcaccagaggtggatggagggcaagagggaggggtggaccagagtcccgcttccctcttgctagaacccagtgacttcatgtcctctattagcaccccaaccgactgccacctcatcaactcgcttcttgatctcagcttggctggttcccagctcatgcagtcatttattcattcaacaagcatcacccacgctgggcccccaagaggcctcagccctgaccaggtcctcaaggagctatcttaagagaggacagagctggacatagacactcctagtcccatgcagttaaggaaggtccagagggaaagacagggtcctggaaggcttcctggaggaggaggcattacagttggggcttcaacgcatgagtaggagttcactaagattccccaaacctatcattggctctccaagctcctccaagcctctcccactgagttcttgcacagtggcacctctatgctggaggggacagtgaggagggctcccagcagcttgggaaaatgtagctggctgggatagcatggttaggagtggagaggatagaaggaattggtggtgggggaagaggtccatgtggagccaaggcaggtgcgtgggcagaggggcactggctcaagaagtccctctggagtgagcctggtgtctggggtgggcaacttggggaggaggctgaggtcccagaagcagatgggggcctgaggcagactggaggggtagtagtgacaaaaatgatactgaggaggggtgggctgggagaaggcctcacctgaacctggtgtcaggtggaccaggtacaacctatgccagcccgactcactgtgccaccttaactgcgtgtgacaccatgtccacagctgtcaaatgcacagaggcttctccgggatctgggaggctgggagtccactcccccacgttttcccctcttttcggcctctgtccttcacatcgccaaactccaagaaatggtcaaaggctttgaacggagaccttgaagaaaaagcgggaaactgcttttcaacatgtccagagatgctcattcttgccaggtgcagtggcttacacctgtaatcccaacactttgggaggctgaagtgagcagatcgcttgagcccaggagttcgagaccagcctggccatcatggtgaaaccccgtctctactttaaaaaatacaaaaattagccaggtgtggtggtatgtgcctgtagtcccagctactcaggaggctgaggcaggagaattgtttgaacccaggaggtggaggctgcagtgagccaagatcactccactgcattccagcctgggcaacagagtgagacctgtctcaaaaaaaaaaaaaagttcacacttaataagaaaactgcaaatcacaaactgtttgtcttcaccaatcaaattggcaaaaatccaacaatgcaatgacattctgtgccagccaggctgtggggtgcgtccatggtgtagcactggtggagggcaccctggcacaggccaccggaatgataaactcatgtgcctgctgacacagcaagtccacttctgggaatccctgcctgaatatttgcatgtttacagtgtgaactgactaacgaataaaaaaatgtggctcagcctggacgtggtggctcatgcctgtaatcccagcactttgggggaccaaggtgggcggatcacgaggtcaggagtaccagaccagcctggccaacatggtgaaaccccgtctccactaaaaatacaaaaattagctgggcatggtggcacgtgcctgtaatcccagctactagggaggctgaggcaggagaatcgcttgaacccaggaggcagaggttgcagtgagctgagatcatgccactgcactccagtttgggcgttagagcgagactccatctcaataataataataataataataataataataatttaaaaattagctgggcatggtggcttcagcctgtagtcccagctacttcagaggctgaggtgggaggatcccttgagcccagaaggttgtgactgcagtgagccgtgattgtgccactccactccagcctatgcagcagagcaagaccctatctctaaaaaataatttaaaataaatggctgggccggccgcggtggctcatgcctgtaatcccagcactttgggaggctgaggtgggcggatcacctgaggtccagagtttgagactagcctgaccaacgtggagaaactccatctctactaaatacacaaaattagccgggtgtggtggcgcatgcctgtaatcccagctacttgggaggctgaggcaggagaatcacttgagcctgggaggtagagtttgcagttgagccgagatcacggcactgcactccagcctgggcaacaagagcaaaactccatctcaaaataataataataaataaataaattggctaaaatgttcaattttatgttgtgtgtatgttgcaggtttgtttttttgagaaggcaaagtcaggcgtggtggctcacacctgtaatcccagcactttgggaggctgaggtgggcggatcacaaggtcaggagactgagacaatcctggccaacgctgtgaaaccctgtctctaccaaaaatacaaaaaattagctgggcgtggtggcatgtacctgtaatcccagctactcgggaggctgaggcaggaaaatcacttgaaccagggagttggaggttgcagtaagcctagatcgcgccacagcactccagcctggtgacagagcgagacttcatataaaaaaaaaaaagagagagagagagaaggcaaaaagatgctccaggctcaaagtgattcattgcagcattgtttgttacatgaaaaaaaataaaatgggccgggcacagtgagtcatgcctgtaatcccagcactttgggaggtcaagataggaggatcgcttgagcccaggagttcaagactagcctgggcaatatggtgaaaccccatgtctaccaaaaaaaaaaatttttatatatatatatagatagatatacacacacacaaaaattagctgggagtggtggcacatccttacagttccagctactcgggaacctaaggcaggaggatcgcttgagtctggaaggcagaggttgaagtgagctgaaatcgtgccactgcactccagcctggggtgacagagtgcagagtgatcctctgcctcaagaagaaggaaaaaaaaaaaaaggaaataacttaaaggattggttacattagtaacagttcagttcatccatcctagcatgccacaaagttctgaaaatgaaattataaatctctatgaacctataaggaaagactcattcatttcctctgtaagcctttatgaagttcctgttgtataccaggtactatgaaccacagacacagcagtgaataaaacagacaaaaatcccagccccccctccccccacctctcactgtagttggggaaacagacaacaggcagaatccatcgggaaaatatatcaagtgcaggtggtgggaatgctgcaaagaaaaataagggcaggaaatgagatgggaaacttttatttatttatttatttatttatttatttatttatttatttgaaacggagttttgctcttgttgcccaggctggagtgcagtgatgcgatctcggctcactgcaacctccacctcccgggttcaagcgattctcctgcctcagcctcccaagtagctgggattacaggcgcatgggaccatgcccagttaactttttgtatttttagtagagacggggtttcaccatgttggccaggctggtcccgaattcctgacctcaggtgatccaccctcctcagcctcccagagtgttgggattacaggcgtgagccactgagcctggccgcagaagcaacttttcaatgggatgatcaaggaaccccttagggagtaaggaggaagggatgtggggaacagcatccaggagtgggaacagcatgtgcaaaggccctgtggtgggagcagccctgggtagagagcagatgtctccaaatgtttgttcaggctgctataacaaatatgccgtaaactggggtagcttatgaacaacagttccggaagctgggaagtccaagatcaaggcaccagcagattcacttcctagtttgcagatgaccgtcttctcactgtgtcctcagtagacagcagagggagcaggggagctcttggggcctcttttataaggagcagagggatggaggagcccagccagcagtgagcctcatgcagctgcacgtcctccacgcccagttctgaggcctcttagaaaaaaaggaaataaagaaatgaggaagtgccagacccgaggctgcaggtggtgggggacaggcaggcctggggtctgggatagtgagttttggaggtgggtctgggggagccgggggccttggagtctgaggtctgtggggtcctgagatttggggactctgaggtctggggatccaggggtctgagagtcctggaatctaagggtcctgaggtctgggggtcctaaagtctgaggatccggaggtttgggggtcctgggatctaggggtcttgggatatgggggtttggtgggggggtataggggtctggggatccagatgtctgagagtcttggggtctgggggtccaggggtctggtggttctgaagtctggggatccagaggtctgggagtcttgggatctgggggtcctgcagtctgggggccctggagtttggtagtcctggggtctgggatgtagggaaaagaaaaagcgatcagactgttactgtgtctatgtagaaaaggaagacataaaaaacttcattttgacccataccctgaacaattgctttgccctgagatgctgttaatctgtaactttagccccaacctcgagctcacagaaatatgtgttgtatggaatcaaggtttaagggatctagggctgtgcaggatgtgctttgctaataaaatgtttgcaggcagtgtgcttggtaaaagtcatcgccattctccattctcgagtaaccaggggcacaatgcactgcagaaagccgcagggacctctgctctggaaagtcaggtactgtccaagatttctccccatgggatagtctgaaacatggcctcgtgggatgggaaagatctgatcgtccccccagcccgacacccgtgaagggtctgtgctgaggaggattagtaaaagaggaaggcctcttgcagttgagctaagaggaaggcctctgtctcctgcctgcccctgggaactgaatgtctcggtataaaacccgattgtacatttgttcaattctgagataggagaaaaaccgccctatggcgggaggcgagacgtattggcagcaatgctgctctgttactctttactcggctgagatgtttgggtggagagaagtataaatctggcctacgtgcacatccaggcacagtacctgctcttgaacttgtgacacggattcctttgctcacatgttttcttgctgacctcctccccactatcaccctgctctcttgatgcattcctcttgctgagatagtgaaaatagtaatcaataaatactgagggaactcagagactggtgccagtgcaggtccttggtatgctgagcgccggtcccctgggcccactgttctttctctatactctgtctctgtgtcttatttcttttctcagtctctcattccacctgatgagatatcccacaggtgtggaggggcaggccaccccttcatgcaggtcttaggatgtgagggttctgaggtctgtgggttctggggtatggggatccagaggtctgggagtcttggggtttgggagtcctggggcctgaggatcctggggtctggggatcctggggactgagggtcctgggctctggggatccagaggtctgggagtcttggggtttgggagtcctggggcctgagggtcctggggtctggggatccagaagtctgggggtcctggggtcctgaggtctgggggtcttggggtctgggggtgctggggtctagggatccagaggtctgggagtcttggggtctggggcccctggggtctgggccttcctgacacagccccagctggctactcccaggtttctgggaaaggggacagctcaaggctccactggcctcatccctggctgaagggagcctggaactttcagaggccacctccctggggtccctctgctgccccctgatgtacctgaagccgtcccaggcttgagtcccaggcagggccagccagtctgcacaaaaacctccaggcagccgccagagatggccccagacagagagacaccagcccgccccccagctatactcagagatgccaagagaccctcagaaacacttgggggccaccataggcatgcagagacacctagggacactcagaaacgcccagggatgcccagaaaacctcagagacccccaagatcctcagagacatttagagaccttcagagactcccaaagaccctcagagaccctcagagaccctcagagatccccagagaccctcagagaccctcagagatccccagagactttcagagacattcagagacatccaggctgggcatggtggctgacgcctgtaatcctagcactttaggaggctgaggcaggtggatcacctgaggtcaggagttcacgaccagcctggccaacatggtgaaaccccgcctctactaaaaatacaaaaattagccaggaatgatagtgcacgcctgtaattccagctactcgggaggctgaggcaggagaatcacttgaacccaagaggcagaggttgtagtgagctgagattgtgccactgcactccagcctgggtgacagagcgagactctgtctcaaaaaaaaaaaaaaaaaggctgggcggggtggctcacgcctgtaatcccagcacttagggaggctgaggtgggtggatcacaaggtcaggagattgagaccatcctggctaacacggtgaaaccccgtctctactaaaaatacaaaaaattagctgggcgtggtggtgggtgtctgtagtcccagctaccggggaggctgaggcaggagaatagcgtgaacctgggaggcagagcttgcagtgagccaagaccacgccactgcactccagcgcaggtaacagagcgagactccatctcaaaaaaaaaaaaaaaaaaaagataaatattcagagacattgagaccacccagagatcctcacagaccctagagatgccctggaaagcccagaggcccccccccccgcgaaagaaaaaaacatggagagccaggcaagaagctccctggggtggccccgcctcaattcaaccccatcaccacattcacccaacaccctcaggtcctcagagcccaccctgaggtgggtgatgccagagtccctccaggcctcagcctgggtgctgccccaagaaccctcagtctaggcagtggggcaaccatggatgcctggccctgtggagtcagatcaggctggaacagggtcaagggctgccctcccccttccccagccacctgcacagaccccaaatctcccaccccagcctcctccttcctggttttctgccacctccatcctctctgtgacagccatgaggcagagcaggggaatttaaaaaccctcccccacgccaggcgtgatggctcatgcctgtaatcccagcactttgggaggccgagttgggaggatcgcttgagcccaggagttcaagaccagcctgggcaacatagtgagactctgtctctacaaaaaaaaaaaaaaaaatctttttgagacaaggtctctgtccgacacccatgctggagtgcaatgctaaaatcattgctcactgcactgcatcctcagcctctgggactcaggtgatcctcccacctcagcctccagagtagctgggtctgcaggcacatgtcaccatgcctggctaattatctgtattattttaagagatggggttggccaagtgcagtggctcatgcctgtaatcccagcactttgggagatcgagagcaggcagatcacgaggtcaggtgatcgagaccatcctggctaacaaacacagtgaaaccctgtctctactaaaaatacaaaaaattagttaagcgtggtggcgtgcgcctgtagtcccagctactccggaggctgaggcaggagaatggtgtgcacctgggaggcggagcttgcagtgagctgagattgcgccactgcactccagcctgggtgacagagcaagactccgtctaaaaaaaaaaaaaaaagacagagagagaaagaagagagatggggtttttgccatgttgcccaggcaggtctcaaactcctgggctcaaatgatcctcctgcctcagcctcccaaagtgtcgggattacaggcgtgagacactgtaccaagccaaaaactttatttatttatttatttttatgagacaggatctggctgtgtcgcccaggctggagtgcagtggcacattctcggctcactgcaaccttcccttctcgggttcaagggattctcatgcctcagcctcccaagaagctgagattataggtgtgcgccaccatgcccagctattattattattactattattattattatcattattattattatgtagagacggggttttgcaatgttagccaggctggtctcaaactcctggcctcaaatgatcttcccaccttggcctctcaaagtgctgggattacaggtgtgagccaccacgtgctgcctaaaaaagtttttttaaattagccaggcctggtggtgtgcgcctgtagtcccagctactcgggaggctgaggtgggaggatccgttgggcccaggaggtcaaggctgcagtgagccatgattgtgccaccgcactccagcctgggccacagagtgaggccctatgtctaaaaaatataaattaaaaaaaaaaatacaaagtctgcccgcaggtccgctgctggtggaatccagtcttccccagagagatggggagggctgagccaagcaccagagaccctcaataaggcctggaagtctggaggggtctgaggggctctggagccagcggtcaggaccagaagtaggtgtaatgaccatgagtctgggccagggaggacttaaaggaacggctggaaggtggactgacatggacattgtggacctatacgcattcattcatcaaacgatgattgaggctggctcagacacttccaagctgtgtgacctaggacccgcacctcaacatctctgtgccttggctgcctcctctgtatttttatattttttattttattattattattattatttttgagatggagtctcgctctgtctcctaggctgaagtgttaggggcatgaacttggctcactgcgacctctgcctcccgggttcaagcgattctcatgactcaacttcccaagtagctggaattacagatgcacaccaccacgcctggctaatttttgtatttttagtagagacggggtttcaccttgttggccaggctggtctcgaactcctgacctcaggtgatcctcccacctcggcctcccagagtgctgggattacaggcgtaagacacagcacccagcccaaagcatgactttttaataacatgagaagaccttgtttaaggtcacatggccttgttagttatagtaatgttttttttgttgttgtttttgtttttgagacggagtctcgttctgttgcccaggctggagtgcagtggcgtgatctgggctcactgcaagctccgccccccgggttcacgccattctcctgcctcaacctcccaagtagctgggactagagtagctgggactacaggcgcccgccaccacgcccggttaattttttgtatttttagtagagacggggtttcactgtgttagccaggatggtctcgatctcctgacctcgtgatccacccacctcggcctcccaaagtgctgggattacaggtgtgagccactgtacccggccttagtaatttttgttttgttttgttttttgacgcagagtctgggctcagtcacccagcctggggtgcagtggcgcaatcatggctcactgcaacctgcacctcctcggctcaagtgatcctcctacctcagcctcccaagtagctgggattacaggtgcacaccaccacacccgcctaatttttctatttttctggtagagacagggtttcaccacattgcccagactggtctcaaacttctgggctcaagcaaccctcctgccttggcctcccagagtgctgggactacaggcatgagccaccacgcccgccctgctggttctagtaaaattttaaaagccactgaatacctttgggagagtcgtggggaaataaaacgtggcatgaaggcagccatggtcggccaagcatgtcccacctgtgaggcttgcatttcttggctgacagtgacgctgaccacgggaggccacgtcatggccacatggctctcttgagagcagtcttcaaccacagacggaaggagagttggctgtaaatgcctccgctccctccaccctcaggtaggacaacagaagcacctcttctgttgctgtctccctgagaaaggacccattcctggtggcccacgttgaacctgctcgctggcaccccctgcagggctccccttcccttcctgcctctttaacccccaggagggcttctgggatcacctctcagataatgcccctgaattgagtcttagagtctccttcaccaagccaccaattttttttttttttgagactgagtaccgctctatctcccaggctggtgtgcagtggcaccatcacggctcactgcaaactccgccccccaggttcaagtgattctcctgcctcagcctcctgagtagttgggattataggcgcccgccatcgcacccggctaatttttgtatttttagtagagacagggttttgccatgttggccaggctggtctcgaacctgatctcaggtgatccgcctgccttggcctcccaaagtgctgggattacagtcgtgagccaccgcacgcggcccaaaccaccaaattaagacagttcttttggtttgtttttttgagacaaggtctcactcggtcacccaggctggagtgcagtggcgtgatctcactcactgcaacctccacttcctgggctcaagcgatcctcctggctcagcctcccatgtagtggggaccatgggtgtgggccaccacacttggctaattttttgattttttgtagagatgagggtcttgctatgttgcataggctggtctcaaactcctggcctcaaacgatcctcccgtcttgccctcccaaagtgctgggattacaggcatgagccaacatgcccggcctaaatcagcaaattataaaggagattagacagtaatagtgctgtggtgctgatctgcctatggagtggccattctttttttttttttttttgagacagagtctcgctctgtcatccaggctggagtgcagtagtgcgatctgggctcactgcaacctctacctcccaggttcaagcgattctctcgcctcagccttctgagtagctgggattgcaggtgtgcgccacgtcaattggctaattttttgtgattttggtacagatacggcttcaccatgttgcccatctgttctcgaactcctcagctcaggcaatctgtttgcctcggcctcccaaagtgttggtattacaggcgtgagccatggcgaccagctgtagccattcttttattattttactttcttaataaatttgatttcacttaaaaaaaaaatgccatggccaaaaaattagagtcaaggagtcgggagagtaggatggttcaaagatttttcttgttttgaaacagagtcttgctctgtcacccaggctggggtgcagtggcacaatcatggctccaccacatccagctaattttttattttttgtagagacaggaggtctcactgtgttgcccaggctggcctcaaattgctggcctcacgtgatcctccctcctcggcctcccaaatgctgagattacaggcatgagccaccgtgcctggcctggttcagtttttgttttttctttcttttttgagtctgagtctcgctctgtcatccaggctggagtgcagtggctcaatctcggctcactgaaatctctgtctctcaggttcaagcgattctcctgcctcagccgcctgagtagctggaaatacaggcgcatgacaccacacctggctaatttttgttttttggagacggagtctcgctctgtcgcccaagttggagtgcagtggcacgatctcggctcactgcaagctccgcctcccgggttgaagccattctcctgcctcagcctccagagtagccgagactacaggcgcccgccaccacgcccggctaatttttttttgtatttttagtagagacggggtttcaccgtgttagccaggatggtctcgatctcctgacctcatgatccgcccgcctcgacctcccaaagtgctgggattacaggcgtgagccaccccgcccggcctaatttttgtatttttagtgaagacagggtttcaccatgttggccaggctggtattgaactcctgacctcaagtgatccgcccacctcggcctcccaaagtgctgggattacaggcgtgagtcaccgcgcccggcctggttcagttttaaacgggctagtcaaagaaggcctctctagaaaaaaatatggacaaacaagaaaaaaagatgcgcagggaggagttcaaaatggggacaggatttttgggggtgtggcgtgactgggtgatgttttctatatttgcctcctccttgccatgaaataattcaatacagaaatatgtaaatatacatttgtaagccgacctgagagcaagggcaaggtcaagagaggcagactagattccaccgctgacccttggggtcttagctcagggaggcctcaaggggatgctgggggcgggacctgctgggattctcaggagttgctacattgagtctctgctgccctcaagtggttatattcggaaccgcaggtgctggctgccttggcgaaggcaggcaactccgtagaccacacagaggagttcagcacagaggggacattggtaatctttagtccatttgctcagcaacaaatatttgttgagcacctactgtatgccagaaagtgttataagcgctagggacacagccctgaacaaaacatacaaatttcggccgggcgcggtggctcacgcctgtaatcccagcactttgggaggccaaggcaggaggatcacttgaggccaggagttcaagaccagtctgggtagcatagtgagacccccttctctacaaaagaaagcaaaacatagaaacctcctgcccgcatggagctcaagggttcctggggcaataaatatgcaaaaattaacaaacaagatatccaggaagggtcaggtgcatgggctcacgcctgtaatctcaacactttgggatgccaaagtgggcagatcacctgaggtcaggagtttgagaccagcctggccaacatgatgaaaccttgtctctactaaaaaaatacaaaaagtagccgggcgtggtggcacacacctgtaatcccagctactcgggaggctgaggcaggagaattgcttgaacccaggagagggaggttgcagtgagtcaagattgcgccactgcactccagcctgggcaacagagcgagacttcgtcttaaagaaaaaaaaaagtatccaggaagatccaacaaggtaatataatccaaacagaggtttggggacctctccgagggtatgtcactggagctgaagcctgaaggatgaagagaagctggccatggtgtacagttgtagaaaaggtatcccggccaggagaaaacccaatgcaaaggccctggggtgggatgacctggatgcatttaacataatcatgtcaaaacatgctcaatatcaggtacttaccaagtgtggactctgtggtgttgttaagccaaaggacccccagaagggaagaaaagactcgtgtccctgtaccatcccgagagggatggaccttagggtaccacaggaaatctttcttccaccagtaagaagagagactgaatctgggcacagtggcacacatctgtagtcccagctacttgagaggctgaggcgagaggatcgcttgaggccaggagttcgagaccaacctgggaaacaaagtcagaccccccacacacacacacaaaataaaattagctgggcttggtggtgcacgtctgttgccccagctactcgggaagctgagctgcgaggatcgcttgagcccaggagtttgaggctgcagtgagctgtgattgtgccactgcactccagcctgggtgacagagtgagactgtctctaaaaaaaggaggatgagggccaggtgcagtggttcatgcctgtaatcccagcactttgggaggctgaggtgggtggaccatcaggtcaggaggtcaagaccagcctggccaagatggtgaaacgccgtctctactaaaaatacaaaaattagccgggcgtggtggcaggcgcctgtaatcccagctactcgggaggctgaggcagagaattgcttgaactcaggaggtggaggtttgcagtgagtcgagatcgcaccacggcactccagcctgggcaacagaatgagactccatctcaaaaaaaaaaaaaaaaaaaaaggaggaggcggaggctggagctctagacagacgaggtgaggaatgggcattgtcagggtacctcgaagtcagatctggtgcctccactccctgatttgtgtccccaggcaagttgctttgctgctctgaacctttctcagacataggtgagtgccacctatgggtctctcacacgacacccttgatgccgtgatgagcctcagtttccccatctgtaacatggggagaagaaatgacagccaggagtggtggcgcacacctgtggtcctagctacttgggaggccaaggtgggaggactgcttaagcccgggaggtggaggctgccaaggcagctggttgaggttcagcgagagcactgaagcagagcgctgggtgcacggtagctggggcttccagtagctggctctgagttgaagattcaagggcaggtgggatcaggtggggtgaggggatacctgggaggtgaccccaggaagctcctggtagggaatgggacatgagacaggaagggaaggagccctacagggggcaccaactgccaacagacatgacacatgtggatgagtggcgctcagccccgcctgggacagctgggggacagtgtagatgctcatctcagaggggtcccactcaggggcgaggagcgtggggtgttttggtttgggtttttttttttttttttttagacggagttttggtcttattgtggacgtgggggagggacgacgaacgtgagggtgggaggttgtaggttcagcagaggctcctcggccaggagtgcaatggcacaatctcagctcacggcaacctccgcttcctgggttcaagagattgtcctgcctcagcctcctgaatagctgggattacatacaggcacgcgccaccacgcctggctaattttttgtaattttagtagaaatggggtttcaccatgttggccaggatggtctcaaactcctgacctcaggtgatccactcgccttggcctcccaaagtgctgggattacaggcgtgacccaccacacccagccctgtggggtgtttatccacccccaacctcattttgatttcccagaaaacagacccaagatggcacactgagaatgtggggcacatgggtatccggccatgggagctggggaagggccctgcagggggtgcccaggagcaggggaggtcgtgggaaatgaagctcagtcctgtcggagaccttagggagactggcatgtccttagacggggcattcccagggcaggcacggtggtggctcacacctgtaatcgcagcactttgggaggccaaggcgggcagatcgcctgaagtcgggagttcaagaccagcctggccagcatggtgaaaccccgtctctactaaaaatacaaaaattagccaggtgtggtggcaggcacctgtaatcccagctactcaggaagctgaggcaggagaattgcttgaacctgggaggcggaggttgcagtgagccgagattgtgccactgcactccagcctgggcaacagtgcaagactccatctcaaaaaaacaaacaaacaaaaaaaacggcattccctcggccagagaaagctacaggtgaggagtagcagaagctggcggtggggagtgcagccacgtggttaggcccaggatgggctgcagccagcgtgcacccagagctaccagcagctattacagaccctcctcctagacctgggatttctaagagacacctcgagtctcccagaccagacagggtactggaagcactctgatgggtggggtattgcctctgggtcgctcacatgacgtccttggttcctttacgagcctcagtttccccatctgtaacatggggagaagaaatgatggctgggcttgttagtgcatgcatttggtcccagctacttgggaagctgaggtgggaggatcacttaaacccggaggttgaggctgcagtgagctatgattgtgccgctgcactccagcctgggtgacagagtgagacacccatatctaaaaagaaaaactagagatgctgccaccttctttggtctggaaggaggacattaccagaggatggaagccagttcccaagggttagtatgactctggagttcaagtgcagggcagaggggtggggcttcgatgtgtggccggtgaaagccacacaaggtgctagaagcacagaagtgtaccggctttggttaagctttgtggaggacggacgtgggggtgtgagttgcaggtttggcagaggcttcttggccaggccctcctgtatcccttctgtcacccggagtccctcgcagccctgtgggattggtggcatgacccagtggcttggaggggtcactgaagttcagctgtttcccggtcaaggccacacagtgagccagggcacagctaggttcaaacccaggcccagagcctctatctgtgagtttccgcctccaggcaactagtcttggggtataatccccatttcagaaaccctagctggctgtccaaggagtgaggctgtctgaacacccctctgcccatgctggccacccccagccttcctgagtcaaaggcccagctcctcccaccccccaccctcgacctaccctcgtgttcaccagctgctgtggctgctcccaccctggtgttgtttgggttttaatttttgtgttgcatttagaaaattacccataattacagcttctgagaggaaacggtctcctagcgcagacccggctcccagctgtggccgcctcccacgcacgcacggctggggaggggttgcagggggcgccagccccagtcctggcccctcccagggccccccactttaatgaggaggagggagggaggccgtttccgccacctatggagaagaaaaaccaccagcaggaaaacccaacccggcctcctctgcaggaatggggagtactcgtgggcccccccactgctgtgtcctcaaggagacaggacccagaggaaggcggaggcggccaactgaggacgggatgcgttatttcatccgaatactgccaagtccaactagggactgtgcggaaacagtcttgcgggggcagtgcccagggaaggcttggaggaggaggaggaagaggaggagggagaggaagaggaagaggaggagttggcctcctcccccaggaggaccaaggaggaacccttggccaaaggaggagcctcagtaggccaggccagaagccagagaaaaagcgttccaggcggcaggaaccgctagcgcaaaggcttatgggtgggactgtgcagggtggatccagggtgagggtacagtcggccccttctcctggcaacctccctgccctaaaagaagattctccttagggctcctccaggcacagcccctgacccgtatttaggggacatccatggtgggtgactcaccactgtccaccccaagaagcagagacccagccgaggacctgccctgggccccttccccggggcaacctccccgccccctctgtgccaccttgatctcactggcaacggagcttcttaggtttttttagtttttgttgttgttattttgagacggagtctcactctatgcccaggctggagcgcaatcttggctcactgcaaccttcgcctcccgggttcaagcgattctcctgcctcagcctcctgagtagctgggattacagacgcccgccactacacccagctaatttttgtgttttgagtagagagggggtttcaccatgttgtttaggctggtctcgaactcctgacctgaggtgattcgcccgcctcagcctcccaaagtgctgggattacaggcatgagccaccgcgcccggccggtttttttagtttttagtaagagtcttggtctgtcgtccaggctgaagtgcagtggcacgatcacagctaactgcagccttcacctgctgggttcaagccatcatcctgtctcggcctccgaagtgctggggctacaggcacacgctgccaccacgtgcggcctcccatggagcttcttaaaatcgtgacgtagatcccatcctctcctcgcggctccacaccctcccattgctccctaatgctcttagaaaaaaatctcaccccctcccctctgggcgtggtctagctctctgccttccctgccatcatccccctcttcttcaccctgccccggccacggctgcttcctggctctgcctccagcgccttcgccgtgtgcccacctcagggccttggcccttactgtgactacagtctgaacattccacttccaggtctttcaaatccacccctcctctccccgttattaataatttttcctccccgccctgcccgtccttcgcgtgggtggggggtccctttctgcgggttctgcccccgcaaggcgtgcgccctggttgggagtgcgcgcggctcagctccccgacgccgcgtgggacccagggcccgctgccctcgcacttttccgccagcgcccaggctgtgtttggagatccttcccggttgccatgagaaccgcgctcctcgctcccgccctccgcgcctcccccatcacagctctctgggccgccggcgcctcagcctccctccctccttccctccctccctccgcctccgccctcccccgggagaccgaccgaccccgccgtcgcccgtcctgtcaccaggggtcccctccctctcacgcacgtggcactccctgaaattaaccgactgactcgccagcttttgactgtccgcctcccccatcagattctgagctccaagaggtagcaacgtgtcccggctgggtctccggagcccagcacacagtaggcgctcaatacatgtttaatggggtgaagactcacattgacccaaggaaccgtggctcacagggggcgagggaccaaccagggcacacagggccctggggagccacggagctttaggagattaaactgggggtggcaggaggggcatctgccgggcccgggagtgccggttgtcaccaaggctctgtgtgactttgggtgagccacaccctctctgtgcctcattaggagtaggcgctggcgggggcagtggtgggagcggtcattaggatgggagtgacctggacgccgaagcccacgccccccgtggtcccccaggctccggggccgtcgccagcccgaggccctgcggaattgtgcgggcccctcctaccccgccgagccggggcccggaggcccgcgggagaggaagctgggggaaggggcggccggctggacaggaagtgggaagggctggcgtcccccctcccgcgccgaggcccctcggggaggaggcggggctggggccggtcctgcccttcccttcctctccgcgggtctggagccccggcggctcccgacttcccgccggccagaaggcttggggtgggggcggggggttctcacgtactggggggcggcctctatcggggaggcatctgcggggtcagctggcagcgagagacatccagacattcacacacaaacacacacacgaaacgtgagcacagagccacacacaggtcctagggagctggcggcccacccacgcgcggagacacacacgtgcacattcggcacacacttgtgcacgcaacctcactgagcgactcggcccgactcggacccacaactgccaccgcgcagccagggacagtcgccgagacagcgataatttattgggtgtttgcccgccccccacgcacaaggatgcacacgtgcactcacacgggagccgcgtgtttgcacacacgcgggcttgcctaggaaaaaagaggaatagccgtggcaaacacagaaacatctagacccagagtcaaccgcaccgccttcccctaccctgcccatccacacacgacccactggtacccgggcatccctgccctgcgggggtccctgactcagtatccgcccccaccctctctgaacacccctggtggggggatgaagggccctaaaaggggaaaagggcacccactgcctgcaccctgactcccgcagacaaaggtgggatgcgccccatttacagctcacagcaccgaggctgagaagcccaaacagcagtcacccagcacctagtattgtcaccgggtgttacttcggggtggtgccaggtggctcccacagcctgggtactataggagctttgtgtctgtgtgcctgggttgtgtctgtgttgtgtgacttcgggcgggacgctgagtgtccgcaggccctgtgactgtggagctgggtagggtgtggttctgaggaggccgcgatagtgcgccccagggtgactgtgagttaactccgtgggctctgtccacggctgttggaagctgtggcacggccttgcataagcgcgcgcctgcgtgaggctgggtgcctgtgtgcggtggcctgtgtttagttgttccaggacggccactgtgagctgggtgtgtggcagtgtatgtgtgtcgctgggcgggctgtatgtgcggtggttcccacccttgctgagtgtgggtagctctgcggggtgagacacccaatgtcactgcctgaggctttatggggctatccgcagtcgttccagcagcggggtacacttttgctgtgtggagcgctatgttgagtgtcgctgcgaatgtgtgtggctgggtgtacaacaatgtgggtggccggctccatttgaggtgagtgaacgtgtgtgtgcacgcgcgcgtgtgcagccgcgatcagctgtgcgtccctgggtggccgtccgggatcctgacccgcgagtgtgtagccgcgcccccaccccccgcggcgggcactgcgcgtgcgcgctccggcggcgggacccacccgcgcgcccgccatcgcccctttaagagctgcgcccgcgggcggcgtagaggcagcgggcgggggcgcgcgcggcgggaggaggggagcgcgcgtttcccggaacagcccgcgcggaggaaagggaggaaaaaaagccaccctgcggccggggccggagctggagccgccgctgccgccgccgccgcggccgtctggagctcccccgcgcggacgatgcctgccgtgcccgcctggggctcggggcggtgaggcccggggcgcggggtagctatggcgacggcaagcgcggcccgcggcgccgcctgacaggtgtgggccccggcggcggcggcgtggagcagcatgtacgccaaggggggcaagggttcggccgtgccctccgacagccaggcccgcgagaagtgagtgcggggccgggggcggggctcggcgtccgcgctcttccgtgggctccggcgcgggcgggcaccgcgcggggcacgtgggcgcgggcggcggggagcgcgagcctgagcgcgctcgaggggtcgcgagattggcgggggcgcgcgacccccgaggggcacgagattggcggggggcgcgcgagaccctgaggggtcgccggagttgagggttggcgggcgacccgaggggcgctagacgggagtggacgggcgagaccggagcggctccaggggtcgcgagattggcgggggcgcgcgaaacccgagggcgcgagatttgagggggcgcgcgagatccccgagcgggtctcgggggtcgcgaggcctcctcgagacgtgggtgcgcgaggctgcggacgcatggggatcgaggtcagcgaagttttccgggacgaacaagagtgtcggctcggggaccccagtcgcctggggtagagctggagagcggctggaggggcgcgccgccacctgtctgccctggccccagcagctgtgtggggcccctggggaagccgcacggttcacagtccaggggcgggtggggacgacggagccgctctcttgataccactgaagagtgcatactgagggccccttttgttctgggcgtggctccaggccgtgggtaccaggcgctctgaagctggtaggggcaggttccaccgtgcggatggaggaagggtcgtggtggggctgaggtctctcggggtggggagtcagccgagtgtgctctccgggtggaaagcatttgaaaggtgcttggagcagtgaccgtcccgcaggaagggcacggggcagtttgcagtgttgttaaaagtgcccagaggccgggcgcggtggctcacgcctgtaatcccagcactttgggaggccgaggcggtcggatcacgaggccaagagatcgagacaatcctggccaacatggtgaaaccccgtctctactaaaaatacaaaaattagctgggcgtgggcgcctgtagtcccaactactcgggaggctgaggcaggagaatcccttgaacccgtggcgcagaggttgcagtgagccgagatcacgccactgcactccagcctggcgacagagccagattccatctcaaaaaaaaaaaacaaaaaacaaaaaaacagtgcccaggaggaggggagtcttgtcatagctgatgggggacttccaggatccttgaagttgagccacctggagtggcccgtggtgtggaactggccacccaagcagagaggaggctgggtcagcagggaggggtcccatgaggacctgccttgagggccaggccaggagtgaggacttgaatgtctgggtgctggagaggagccctggacgttggctgagtgtcccccatcctgcctcttctgcctaggctgacttgggatgccccacccctccacaaagatgcctgtcccctctgcccagcctctgggtcattttggagaagaggctcttctggctagaaggtggtaggcaaatgactgcactgtcaggcctcccttgcctgtgtgcagttaggaagatgagctccatttccaagcacccttaagcccaaagactttttgaaactggcctctggctcctgctcaggtcggaagcaggaggtgtctgccatggtcacccctggacccctggtctgtctcctgtgtgtctccaggcagctgctggctctggaggcatccacccacccagtgggaatcgggatcgttcactgattcagcatatctgccctgggtgtccctgggtgtggcagtcgggaaggcaggctccggtcgggatggcagggtcggtggccctgaagaagcccccaccccagcagggaggcaggtatccagttagcaggagaaagcaaagtggatgatagatagcgaagggtgaggggatgtcaggtggagggcacagcaagtgcaaaggccctgatatgggaccaggaaaaggagctggggctgggcccaggtggaggaagaggcagcctgcaagagtgccagatgggccccagtgggttgtgtgtgcagaagtgcgctctggctcccaggtggagtggggcttataggggtcaggaacagaggctgggaggccctggggatgtggacacagttgtctgaaagagagctggggaggccgggcgtggtggctcacgcctataatcatcctagcactttgggaggccaaggtgggtggatcatttgaggtcaggagttcgagaccagcctggccaacatgatgaaaccctgtctctactaaaaatacaaaaattagccgggcatggtggcgggtgcctgtaatcccagctactctggaggctgaggtgaaaggatcgcttgaacctaggaggtagaggttgcagtgagctgagatcgtgccactgccctccagcctgggtgacagggcgagactccatctcaaaaagaacaaaaaagaaaaacagtgaaagagagctggtggcagcctggacccaagtaagaaggaagagatttcataggtttgagccgggggtggtagggtgagggggttagctgcattcctggcccccttcccatactgtcctcccactccccaacctgcccagcagaggtgctttggggacactggcctcgggactcaaggctctcggaagtccctcagctgccagtggggaggctgcagggcccatctttggtcagagccagcctgcatgcttccatttcacggagagggtctcgtataagtgttggtttggaggtgaggttcctctatgaaagaaagcctggaaaacgccagatggccgcatgcacccatttcaacgaaagggacaccagggccctggagaggaagccacctgatgagaactcagcttctctggcacagatgagctctcagaggcagccccaggcctcagtttcctcatgtgaaatgtggacgacccatctttcaggatctttgcaaggactgggtgggagcccgtaggcagagcacctgccggggcagccacgcggctctcaggaagtatctgcctcgggcaagccacttcctgcctctgggcctcggtttccttctctgtgaaatggggtgaagaggttacactgctccaaaccttgactctccagcactgcacttttcttcctgcaatgagcctcatgcctcctaaaaatgaggcgctgcatatccttccttctctctctggccccaatcctgagccccttctggctgcccttggagcctacaggccttcccggcttacactaggtctcggccagctggctccagaaagggaccgagcacctggtgggtgcctgccctcgggggctcgcagcagatggcagtgactgtggagtgcaggggcagcagagtgggctgagggaggctggggtctgagtgggccacttgcaagaagaggggcatgtgtatatccttcagcactcaagtgttgccaggcaggttgagaagaggtccatgaatcacagccatggttggtgttgcctggcagctcgtgggtttctcccgggcttgattttgagccggcacatggatgtcggtggcttgttcatcagcctggcaggtaagccagggatgggattcacgattggacgtggtcattttggcccctggctggaaatggctatgaggggcaggtgtggagggtagtaaggagaggccgccactttgccaagaagctgccagaggcctggcctttagggttggcagaggggagggaggacggcgagggttggagggtcaggagtgagacctggtgacggatggcaaggtgacacaaagccatgagtggcaggtgtctcctgccccagcagcatctgtgtctaggaaggcgctgagcagggagcatccattgcagccattctgggtaattatggtaactcgcgtcattacggtggtagctgtggtacatttcaggccaccaggcgctagcaccccatcctggctctgcttccctgcacagcctcatgctcgctccaggtccaggcgccccatgtcctccgagtcttgtgttccttctgcagggagagctgcctgctgctcttccgggtgcctccctgttttcctttctggccacctgcctgtgtgacacagggagccctcataggtgacaggccctgagaggttgtaccggcccagggcaggtggccggtggggggcagagggcatgggtgatttgcatccagagcccttccctataactgagctcagggccccaaccggtggcgcccccagacctggcccccggagcagtcctctgggaggggaggaccttgtaggtcccaaaactccctggccgaacagccaggcttcaaaacttttcacccaaaacaataacaacccacagttcttccctggagactgaatcctgtttaaaataaaaggaccaatgtggaagggaaatcagcaaaaccgaaaacttcctttggcctcccatcgctcccaggataaactcccaaatcctcagtatggacagaatagctgctgaccttcatcagtacttaccccatggttcgcctaatcctcccggcatcccaggagggggtccccgggccggtttgttcattcactggggtgactggggcccaggatgcccagctccattctaaggtcgttgcagtgagcagactccaagtccccgccccacgtcaagctacattccattgggggcccaagacagagactctcagatggaggagacggagcagggtgggggcttccatgtgacagtgaagccccgagaggtgacactggagtctctgggtggaagtgccccaggcagggaaacagtgcgcagaggccctggggtgacagggcagccagtgtgtgggtcggggcggggggcggcacaggagggtttgaacaaggaacatgggggtggggggagcagcacctggaggggactctgtcgtaatccaggtgggagacggtgggtggcctggcccaggtgtgcagtggaggtggggagaggggcccaagtcaggaaagagatttccttcggtgtttttttaaacgcagtgatgtttggggacagctgggtggatctcacacaggtgcacgcctgtgcgcacgccaccagaggctccttggacaggatgcatgtgtaaaggccaagctgacagtctctgagcagggagggggagaatggggaaggggtgggggctcagggtgtcgaggctgggcctctagatgtcaagtgaacagggaatcccaagtttggggaaggtcaggccatagcaccctctggacagcccctacttgaaggcatcatcaaaacaggacgggcggccacacagggagagcagaggagaagacagagctggtagccgggggcgggggctggaggcaggaggacagcaggagggggcggagagggcggggtgggctctagggggccacctcctgggttaggcacttatggggacagtcgaggaacaggagacaaggaaggcaggtagaacccttcgcagccccctccttcaggagtccccctgggccttttggacagccgtgccctgggtgtggggtacccagaatgcagcctcagcaggacctcccgctgcccccgccctcccggggccgctcaccagcgttcctgcaactctgtcttaccccactctggcctttcatgccccctgctctgacccctaagtggctggggtgggaactctcttccacacctggcaggtgggttggcactgggctccccaggctagtcggtctgcccctggaacctgctcaccctggccttgtgtgctccccttccactgatggacgcaggcctgtcagccactagccacagggaaaagctcagaagcctctagatgggccagggtgccacagaagtgagctagacaggtgggcctgcaggccgccgggccaggaaagtggaggaagagcaggtgtgggagactggaggggtggaggtcaggatctagcagggcctgggctgggggcagtctcttcaagagtgctgtgatgatgcaggggtgaccattgggcgctgtgtgtcctgccccatccctgcccctggggtggccttcacagctcatgtggtgcagtgtgagcctggcgcactccaccctggaccgcctcccctccctgatgtcacccccccacttgcctttccgtagcctcagcgccttccaagctgccacagagctcacctctcttgacaggtattgcctgtctctgtctctcccctcaagaacatggcctccaggacaggggccgggtgtgtgcactgcgcaaaaggcacttcatggatgctggaggaactaatgaagaagtgaatgaacgaaggaggggaggcaggatgagatttggggcaagggcagtgcccatgaggaccaggtgggggcaggaagtccccatgttctctaggggccggggcaggaacaggaggactggaaatctgaaagggacttgggggccctgatgggtggtgggtgctaggattggagcagcctggctgggagggagcagagcgtgagtcaaaggaaggttattttaggatggggcccgcagccagagagggcggcgcagctgagctggaggcggctgtggaagggcccccaggcctgcctgcttctcgcctctagggctcagcctcaggctggccctctggtaccctgtcttgaatctaagagtcccccaacccccagcagactctcgtggtccctagctggacagtacaagagctctgagcagggagcggctcagttccagggaggtccagaagggctggtgccacaggactgggcgaccctttggatagggggtttgtcctctgctctctggtgtggcagctggactggagcggggtggacagtccggcctccccctgtgacctgcagagggccgtgctggagccacctggctgggcgagggtgactcaggtccaagcccttggggtgcacagtggttgggagggtgagtccaggggtccctggcaggctggggactcgcgcagagccctgtgggtgtttgggtagggcagcaccactgcagacatggcactgcaggccctacctcccctggccccccacctccattccccagacattgccccaggttcagcactgccctgactggggacagtctgcagaaagggttgaggccaccatggtggatgggcatctcttccccaaggaagagatggggtccagggactgcaggggatgtggggtggaggaccccttccctccttccttcctgggccggggaggctggggatgagtttggaggtgggccctgagcacactacatggcccagggtgcccagtggtcgtccccaccctgcacacacacaggaatgacactcctctatggaggagacctccccagcgctgaggcctctctggagtctcagtgttggcaggacatggccaggacttggtcctcgagggagcgtggaacacagccgaattcggcccggaattgggggtcacggatgcctgggaggggcctgcaggacatagatggataactatgagctgtccctgctgagcagctggtggggaggccacctttccacccgccctcctgagagatggaggggctttggggtgggcccttgccttggagagtctgagctccctgggccgcctcgcccccacaggttggcgctgtacgtttatgagtacctgctgcacatcggtgcccagaagtcagcccagaccttcctgtctgaggtaagccaccacctccaggctggccctccctcctcacccacactccgggggtccttcatttccactggggatccagggggtgggcccgcgttgcccctctgatggccctgggaactgagggctctgcagggtccaggccctgggctagcatccaggcatctggtccacatgcccagccgggacctgccacacatcctggggccctctgcccaccctgttacccttccctccccactccctccctgcccagatgttctctgggcaccctgctgggtggtggggcagggtcaggtagggccaccccctcaccaccttcctttccctgcagatccgatgggagaagaacatcacgctgggggagccccctgggttcctgcactcctggtggtggtacgggctgggctgctgtgggtgggctgtggaagggggttgagggaggcacgtggagcaaccatcttcccctttggcccacagcgtcttctgggacctgtactgcgcggcgcctgacagaagagaggcctgcgagcactccggcgaggccaaggccttccaggactatgtgagtcctggccccagggactcaggggctccagggcgggaggtgtgctgggcctgtggctggggaggtggggtggggggctgcacagccagaggagggctggggatggtggcagtttggggttgacaggcagagctgcagcctccactcaggctcttggccacttttggggggtccttccaccctccacttggtccagggtcactcacagagtaagggaaagctctttccactgcacacacttctgagggtccccacagccctcccacccccattggggcactggggggtgccatttccccgcatctcatgtgagcctgcgtggagatgggggaagctcactgccttccccctcctctgccgtgtgtgcattgggggtcactgctgctcctctgagcggggagcacaggtcggggtgcctgatgggccaggcactgggacactttctgaccttgccaggtatctggagctgcccactccctctctgctgtcattttccctctgggttggaaaaggtcagaggccggcctggagtggaggctgcctggctaacactaggggatggcagcctcctgttgtcatggggcagcagatggcagcccttcccttcatcctctgcgctggaccacctggccccctctgttgggtctgagggggaggtgccggctctgccggtgggcgtctggggggcgccagtcccgcccaccccctaccccctgtgcgccagagcgcaggccccagcaaggcagaggcggcccgaggggtggggcgcccatgtctctgaagatgcctccagcactctgcatgagagctgggcaggctgaagccctcctggcgtcactgctgttcacccccatggtgtcccactactcgtgtgtggtccccttgtcctagtcccgctagatctggggccccgggggtgtctggagctgtggacttgggcgactctgcccccatccctgccgtctgggtctagcatcctctctgggcgccccccgccgggccaggagggcggagctggagagtcggcgtgaacgcgcttcccaggcgcgcagcggttaccatggcagcgccggcgcagagcgtagaccgcagggcccagggcggaggccgcccaagccctggggtgaccgaatccccgcggggactcgtcatgccgggccgtcgcctccgttgctctcgctctaactgggggcgccttgcccgccgagcctgcacggaggcggccccttcctctctcgccctccgaggcgggggaggggggcggggggggctctgttcgcccctccccggctccctgccgaccttggcgtctccaggaaacgccggagcgcccagcccatcgccatggcaacgcgggccgggccggctcctcttcagggatgattgacgtagggggtctggcccgggccaaccgccggggagggcgcgccgcccgggattaactgctcagggcctagagttgggaagctgcgggtcgcagggggcggggggggggtgcggtggagcgtccccgaccaggaaacgctcaggcacccgctgtggcccgtgaggggattgccctccctgcggggtggacagacacagggctcaaaggtgccccctccccaccctcggggagtggaccggaggggccgcctgggagggcagctgctccaggccattgtgtttgcgggagggggcggggtgggggccagagcccagaggggacctggaagtttggaactgagaaagtggcacaggagtagggcacgagggctttcgaaggatttgttttgggccttgggagtgctcgccgtcacggtgggcttagggggctcccgcctccagcccctcccccagtttaggaccctggcgggaggcttgaggctaacctcagagaaggggcaggaaggggtcaacccgcagccccacagggggagggaggatttctccaggagccctcctctaggcagggggccccttgcagcagtccctgagggcaggaaacgctgtgtgactgtaggcagagtgctcaacctctctgagcccaagtggctgtagttcatgccacaaacacctgagtgtccctgtgtgctggcttgggccgaccccagagagagcccatcaccttctttttggggtttggggcttggcctggaccatacagacaggggccaggagagaagttctcccctccctgtccccagacgtgttcctctgccctcatagactgggcctcccttcccacctcacatccccctccccaccttccccctgccagaccctgtaggccccatagcagacaggtctagaacttggtccccggccaggtctgggctgccaccacaatttctggcagatacaggaagccccctctccagcaccctgtcttgtcgccttctccatctgagagaggctgggggatggggaccccaccccagaatcctgcttttcaccctccctcctggacgaagggcagggtggggtggggcaggggtctacacttgttctaaggtggagccttcagggaggctcttgaaactgccggtatatttgtgtgtatgtttatttggggggtcctgagtagagttggggacccagctgagctgccctgccagccaggacgatgcagggccagttgagatgggtctggagtggggagcaggtctgtgagaaacgagggcgacactggatcctgcgtcctacagggtcttcagacccacagatcctcaggccgacaaccccagtgtgctcactgaccaatgccagctcgctgtcccatggggccggccacctgcagagagggggggcacaccccaggtaggaagtgtccaggtgtcctgacctggccctctgggtttcccgcacccttacagagtgctgcagccgcccccagccccgttatggggagtatggccccaggtgacacaatggccgcaggctccatggcggctggcttcttccaggtatggccccggctggagtccactggcccccaactctggctgaacatgcgtttgagggtggggggggtcccacgtgggcagaggtcatgaggccggcaggctggagttgggtgggagggtcctctgtgccgcaggtgtgcccaggtgggcctttcaggggccagcgagggagggcccgagtgcagtggagggtgggtgtctgtgcacttggcctgcacatgtgtgcgcacagggtgcttggggatgcagtagccacagtggtcctggtgaccactggtgcctgagtcctgccctcaagccttcccacaaggtccctgtcccacaggctggcccacccctctgcctccatggagcccctcccctcctcagccaaacccagtagggcctcactcccccccacccacctggttctgtcctcctagggcccccccggctcccagccgtccccccacaaccccaacgcccccatgatggggcctcacggtcaggtaaggagctgtggtgcctgcccctcacacacacacatcccctcccccagcgccgccccctcccaccctcaagccatgaggtcctggctggtgccagctggccgggctttgctggctggttctggaggagggggctccccaggtcgggggccccagcatagcaggaatggggtagctttggggaccagagggtgggggaaggtgctgatccccgcccacctcttccagcccttcatgtcaccgcgcttcccagggggcccccggcccaccctgcggatgccgagtcaggtgagaaagggatgaggggagggcgggcaggagctgggccggggagggagcaccccacactcagtgccgccgcaccccctccgcagcctcccgcaggcctccctggctcccagcccctcctccctggcgccatggagccctccccacgagcccagggtgagtagggaagctccagcccctatcccgccatcaatcagaattccagctctcagagcccagaccttgctgcctccccactgtccacactggggaatggtccaggtccaagtccccttccttctgccccaccccagggcatccgagcatgggcggcccaatgcagagggtgacgcctcctcgtggcatggccagcgtggggccccaggtaagagtggagccctggtgggtggggccttcgggctgtccccggtctacccctcacagcccctttgcctccgcagagctatggaggtggcatgcgacccccacccaactccctcgccggcccaggcctgcctgccatgaacatgtaagaccctgggggatcctaggagtgtgcagttcgcaggccaccaccagcttcatggctgggtcagctggggcaggtcctgaatcctcaggacagccttggatattgtttatttcatggccaccgttgaggggaaactgagacttgaagtagcaattagtctcctggggccagtgatgggttgggattggaacctggcagctcatggtggccacttttccagcaacatctgctgctctgtggtcggtctggggatacagtggagcagggtgtggggggtgtgtggtgagggctgtgatccacatggactagccccagagtctgtcatccgcggtctcttccaggggcccaggagttcgtggcccgtgggccagccccagtggaaactcggtgagcctatggctgggtgggcaggcttggggtggggtgggagggacactgggtgagccgcctggctgactgctcacagctgcccttgtccccagatcccctactcctcctcatcccccggcagctacaccgtaagtctgagcaaagctgggtcacccctgggcaggggttgtgggatggcagatgaggggccatttctcacggttcctgtctcttgtgtgcagggacccccaggaggaggtgggccccctggaacacccatcatgcctagccctggaggtatggcctagtaagaggtgggggtgtgctagggtgggtgtgtttgggggaaaccccgtcacacctggcacccttctggtctcccccagattccaccaactccagcgaaaacatgtacactatcatgaaccccatcgggcagggcgccggcagggctaatgtgagtgggggcttgcaggggtgcttctcgaggcggtgaccccacttggggaatgggtggcccgagtcccacgctgtccccatgcccgcagttcccgctcggccctggcccggagggccccatggccgccatgagcgcgatggagcctcaccacgtgaacggatccctgggtgagtgggcgtccctgctcccgcccacgttgccttccgggcccgtgcgctccctggctgcttccccctgccgtcagcccgcctgccgggtggaggcgtctagtggcgtcctgagccccccgggggccgctcagtgacaggggctgccccgagctggagggggatccagcgaccaaaccagaggatgcactgaccgcccctcccccccaggcccaaccctccacctggcctcagtcccggggttcctggcgggctgtgcggggcgggggcgcgtcggcgggggcagcttgcgagggtcgttggcccctggaggccgaggggcatggcgccagcacgtctgagccggtgcccgtgtctgtccgtgtctgtaggctcgggcgacatggacgggttgccgaaggtaaggaggctgcgctcttgccgggggtgggatccggggggggtggcggggagggggcggggcggggagttgcgagccgacggcggccgcccccagagttcccccggcgccgtggccggcctgagcaacgccccgggcaccccgcgggacgacggcgagatggcggccgccgggaccttcctgcacccgttcccgagcgaaagcgtaagcgactgcgtcgactccccccccgcggcggcgtcgggccggaggggctggcgggcaggccccggcggggcggccggggggccagagcaagaccgtgaccgcggcgggccaggtgggggggcggccgcggcatcctttccctctcctcaacctctccccaccccccaccacctcccgctcctatttcaccgtcccgatcccatccgcccccaccccgggacccgcgccccagggcggccttcccatgcatcgcccctcccccgttccctcctgtccccaccccatgtctgcccaggacccagccctgccctgtcccccattgtccctgggggcgggtcccagcctcttccggagctgaactcggcccctgcgcgctgccccctcctctctccgcagtactcgccagggatgaccatgagcgtgtgatggggcggcagccccgggcctctctgcgggcctaggcttctgcccagcgcccctgctcagggcgaggggctgaggtcacacctcgggcacctggactcctggccaatcaaggcttgcccagctgggaggccccacacgaaagactcttaccattttattaaaaacgcaaggacctcagagacgttcttttctgtatggacccttcctgccatttgtattttgtcccagagagaaaggctctttggggggcccctctccccaggacgtcagggggtggggcccataaataaatggaagctggttttggtttttggtagcttgtctcagattccctctttggccttctgccaccacactctccaccctgtggtcttgttccgtccccgcccccatctagccccacctttgagaactgggggcagagcgaggctccaggttctgggctctccctgggagttggggtgatgaccatgggcagaggggatgggactgaagctgggcgctcaagagtcggggaagtagagggaggcagagtcaggtcacaggccccaagaaccccaggtggaaggagggctgagtggcagcgcctttatttgtgggggccttcaaggtagggtcgtggggggcagcggggaggaagagccgagaaactgtgtgaccggggcctcaggtggtgggcattgggggctcctcttgcagatgcccattggcatcaccggtgcagccattggtggcagcgggtaccggtcctttcttgttcaacatagggtaggtggcagccacgggtccaactcgcttgaggctgggccctgggcgctccattttgtgttccaggagcatgtggttctgtggcgggagccccacgcaggccctggagaggtcacacagcttagcagagccagacacccacagggagaaagggggggtatccctgccacctacagccccccaagccctgtgcatagcttagccaggggggtatctgggccccgggcgggaacctggaggctggggtgcacctgaggatgttctcgatgcagctgcgctggcggaaaagcgcattgaccaccgggctgccgggcggcactagtggcgccttgaagaggaagctgagcagggacagcacggggtggaaggtctgcggctcggggtccatgtcagtgcagaagctcacgcgctggcacagctcggtcagcagcgctaggtccagcatgatgggtgcggccagcagcgagtcctgcggggcgggtgggtcaggagatgggggcggtggccaagccctgcctcccatagcagcccctgaagccgcgccgcacctcacacgtgttgtgcagcaccagtgtgttggttccgcccagcatcagctccgaggtatactcatccagcgcgcgcttgctgtcacccacgtacggcacatacttgatgaccacctggagtgcagcaggagtttgcccgggtccctgccacccctcgccgggcaaccccgcgcccgcgcccgcgccccacgcacgcagtggtcaggctcttcgccgggcgtatagagcactgggttgctctgcaccatgtcgtccaccacgttgctcttggacacctccttagagcggaactgcaatggcgccgataggttctccccatcgttgttgcccaggtggttgtaactcacgatggacatggtctgtgggtacaagggaagccccagcagctgcaggccctgcggccccacaagccaggtgctcgcggcccaggcccccttcctgcactcggcagctccctaggcccacgcaccttgaggccggagccaatgaggaagtccacaagcacggacttgactttggtctggcctgacttgaagtcatctccgcccacaaaaacccggtgctgccacgcgagctcaagagctccgggcaccagggtgttctgcggagacccattgaggaaggcacagccctccaggatgctggccacggcgaagagcgtggagggcgacacctccagaccgagctgtgggcaaggcgggcagtcagcacagagctgtgtctgtgactggccctgcctgacccgctccacccgggcgttcgcccacctcaatggtgcgcagcaggttctcggctgtgtcgttgaggcctggaatcacctcacagaagcgctccgtgttcgccgtccacagcactatgactttgtccagccccgcgctagaccggaagtctcggatgtccctgcggatctgctccagctgtgggttggatggtgagggtgtggggaggatggagagggtgtagggaagttggttgtacatactctcggactcacagaggcctgggctactcagttccccgggtgtcaagtgaggcctggattcgcggggtggggcaaaaagagggaaccaagtggcgaagaacaggtggcaggaagcaagggatgcgggatgggacagcacctgctgcgcacgcgagcctgggatgaggttgtccgcgcgcgcgctctggttggccgcgatgaattcggggatgtaaacagaaggccggggccgcagggcctccatgtgcggccacagttgctcctgcagcccccagtccagcaccttcgcgcgccgcatcgcctcggccaggttcagcgacgagatgtcccagcctggggggaccctcacactcggccctgcccggatcctgggcccctccagaccccatctcccatcccgccccaccccggcccagggctccgcccaccatcgaacacgaggtcgttgggcgccaccatgggcagcaccgcgctgaagggtacgaacacctcctggccctcggcgtccaggcccaggctcacggtgcccgcctgagtcagcgagccgtagtagttggcctcctgggggtcagcagacacggcgaggtgacgggtgggagtggtgaaagggccgcgacccggcctgggccccacctagactctcaagccccgccccactttcgggcatttttcagttccaggctcacagccaggacggaagccgctgcccccaggcccctcccctgagacctccggcaccttaagctccgcccctgtaagactcccgaggagtccccgctacctcgcgaaacccttccacggggtccgcctgcagccaggccccgccccctgcaagccctcccgccccacagagcttcgccccctgcaggtccctcgcccactacaggcctccagacccgggcaggtccctcgcccctgcagcccctcgccccgcggaaccccaccccctacagcccccctggtcccgcagagccccgccccctgcaggctcccgcccccgcccgcaaggactcccaccaagcctccctacccaccacgcccctcccgcccccaccttgcggccgctgcgcgtgggccaggacaaacgcagtcgattggccagcaccgcggcggtgagtgtggagccgttgttcccgccccagccgacaagcatgaccccgagccggggcacctgccgggcggtccggaaggtgaagcgcgtggacgtggggtgcacctgaagacaggccgcgcagtgaatcccgggtcccgtgcccttctccccgagccgccccgctctccccagcacgcctccttcctcagccccctggtccaccttgagaacgccaccctcgcggctgacgcgcgtcgtccggtactcgtattgcgcctcgatggcctcggggccgtagaccacgtccgggctctcgacgaagaactgggcggcggcctccatcgcggcgggctgggggcccggggtgagcagggggtcagcggggactctaagcggccggggccaagccagcctgggtccccacggaggccgtccctgccccgaaccgcactcaccggcgcagagtcgactcaggcagcggcggcggacagcgcgggctctcgggcgcgcgacctccggagaaaagcgctgcggcccctcccccgccccgcccccttccccgcctctcccgcgctgggagggaggggcccaacgtctggagacccggttcgaggcccgacaacccagagccaccgtggccatcgggtccccgcctggcggaagtggccaggcgtccacgagcgcggcgcgtataggttcacctcgctcgctccgcagcccccaggggctcatggctgcctatcccccctttacaagaggacaatgaggctacacatgagcccagccacaagccagggggtggagctgggcagggaagctgggcctccgggggggtaggtagggggtctgggtcagagacactgcaggggaaacaggcagaggaccagaactccaaagccagaatctcctcggagccacactgccacctactcccccttcgtgggcagcagcacctaccaggcagtcccatcccctggctccccatgtccgcccccatccatctcgggggacaaagtcactctgtccccacggggctcacaaggatggggcctgtttggcctgtttccccacctgcagcaggagggcttggcaggagtgggccggagcgggaggctgttcgctggaaaggggaggggacgcacaggcgggcagggccgaggcaggggaggaatgaggcctgcactgcagggcgcccccctcatgcgcgctgataagggagcgtgggaacccagcgggcaggccggggcagctcccccaggaactttccaaaacaagcgcctggaggccggaaagtttccaccactggagctggcccaaaaggtggatagttgggaacgtttgcaagagacagggcctgaccttggaggatgagggcttaagactctgggtccaggcctcaccctgaaggggccccagtctgagggagttggaagtggactgggacacccccgccccagtgggtgggaactcacaggcagggcccctgcaagacaggctccccagatgagggggctgctggcaagggttttgagacatgaagaggagttcactgaaagaaaactacaggccaagccacctgagccacccagacagggcagatgaaaaattggctacgtgggaggcagtttggggtcttgggcagaccctgagggctggggatagggagtgtgaaagagtatttggtgtttgttcctggttcttggttagacattgagctcaatcaccagtggccaacgatttaatcaatcacatatatgcaaatgagacagttggggctcagaacacagaaactcccctcagcctcaagttatggggccttggcctgccccgcgctttgagcagggcatcggaaagctcagaatcgagtctctccgaccttctcctgccctcctgcctctagcccctttctcccctggaaaccatagaaaccagaattcctcttccccaaggcaggtcagagacactggagcccttctccccttaaaacaaaaaaaaagccacaaagccggcaaaggtcactctctgcctgctcccttgaagaccctcattccgggagggtcctgcccataccctggaggaaggaatgctacccagagtctaggaagtctgggcaggctggcccccctcccccacccagtctgctccctttaagatctacagtgtttcaacacattgatacacattcttcatagaacctaagccgaaaaataggcagtcagccaggcacggtggctcatgcctgtaatcctagcactttgggaggtcaaagcgggcgcatcgcttgagcccaggagtttgagaccagcctgggcaacacggggaaaccccgtctcaatacaaacaaacaaacaaaaaatagccgggcttggtggcgcacacctgtagtccagctgcgtgggaggctgaggtgggaggatcacctaagctcaggaggtgtaggctgcagtgagccatgattgtaccactgcactccagcctgggcaacagagtaataccctgtctcaaaaaaaaaatggggtttaggggaaaatatggaggggctgggagggtggcatgcctggaaaaggcatggaagcttcacggcccgcccataccttgccctgtgcgcctcctccatttggctgtgagcattttccggagttctgtgagctgttccagcaattatcaaacctgaagtggggtcatgggaactcgcaatttattagcctgcttgccagaagtataggtggcatctgacacaggtgcagccctgtgggactgacccccataacttgtggagtccgataccatctctgggaatggaactgttggacatcctgtaggtactggaggatcagagaatcggggagtttgtgcctcgaggcgacacgtgattcaggaacctgtgtagttgagagacatgaggaaggtcccaagacccagccccggggagcctgtgttcacagggccacctgtagagggtgccggaggatgggagctggcacagggcagctggagggaatcggcatagaggctgggctgcttccactcccagcagttgacaaggccgaaggagggggtttggcccctacagtcaggcctgggtgtgctgaagtcggtggtgagatgcactgttattccccagcaaagtgtgggctccctgaaggcagggatgaggctgagtcactgctgtgttgcagagcccaggtggagcttggtacaggagggggctgcaggaacaggggtgcccgttgaaagaggacaattggggcccctggcaggtggcaggagagggtttaacagctctgagcccctctctaccagggtgcccaggtcatgagggtgggaaggctctcctgaatatccggggcactagactgatggcatccatggctcaggaaggtcaggggactgactgtggcctctgcaggctgcgggggtgatggccagagtattgctgggcagttggcttagggctggcgttggagggccgggggaggcaggaccgtgagctgcaggaggttggtgttggccctgggatgttgggacagagatgttatcctgggagaacagcgtggccaggctatgctgggagcagggtacacgctgccccactgggctgcatgacttcccctcccgcgcccctcagattcctgggtggccttagaacttgggccaaggccacggacgggcagggaggccaggccccccccacagctgcaggcccaggacctttgcccacggtcctattcttcggtgttatcgcttactaaatgcaccccttcttgtccttggctggcaggttgagtgttatgttctccatggcccctggctcgttccacctgcaccaccgccgctcccgtcaggccttttccccatccccactagtggcacaggggatgcccctgccccagtgtgggaagaacaggtaatattaccgttacctgctgctgctttcatcagagggagacagtcacagctggtttcccccacccccagccccactcctgtagcctttggtgccacagggggccaaggaatcccaatgctgggttcagcccaccctatccacaccagagggtactgctgtgctcacacacctgctatggctccctatccctccgccctgacccagcctgcccccacccccgcgctccccgtcacctacagggccctctgatttggtcctttctcaggcaacggctcaggtaggctgcaaactctgccttcttatctggtcccagccagagcccctgaacaaccctttctcatcattatggcggccccaggtcacatcacctcctgatgccagcccacccccaaccacaggacagggacagccaccacagaaaccaggctgtgacacacccacacactacacacacacccacaccccaacacacaccacacacccaacacacacacccccaacacacaccacaccctcacaccacacacacacctacacaccccaacacacaccacacaccacccaacacacaccacaccctcacaccccaacacacaccacacatccggtcaacacacaccaacacacaccacacccacaccaacacaccccaacacacaccacacccacacaccccaacacacacccaccctcaacacatccccaacacaccacacacaccccacaccacacaccccaacacacaccacaccctcataccacacacccagatacaccacatccacacaccacaccccaacacacacccacatcccaacacataccacatcccaacaaacaccacatcctcaccacacacatccccaacacacaccacacaccccacaccccaacacacaccacacacaacacacccacacatacaacacacacaccctaacacatcacacacactacacacccacacacaacatccaacacacaccgacacagatatactacacacccacacaccccaacacacaccacacacacatacacaccatacaccacacacacagatacaccaacacccacacaccacacacaccagccaggcagcctgggctgccaggttcagttcagtgaaatttattggagaatgaaaaaagtcagcattcacctgtttagtgtacaaaaaggacactagatcttttaagaaaatatcaggaaactgaagacgcagatagatgcctttcaattgtaacattttggcaaaagtggaaagttcttgtaaacaccaaccccatggctcaaaatagtttttctccacagtacaacattaaaagaaaaaaaaatagtatcaataagttagaccatatttaatcagctagaactttgtccaccaacccccaaaacacaaaacttttcttagcttcataattccttaaaaggagaacaaataaacaacaaaaacaacaacaacaacaaaaaggcaaattcaactgacagccccttggactggttcccagggcagaggggcgggcagtcccgggctgggacctcctgaaatcatcccacctcaccggtgtctgcagggctgcctgcgggcgacacagcaaggtccagctgactctggaggcctcctggagcctgctcggcccttccccggcccggcccggcccaaagagaaaaacaacaacagctattgaaacatgaaggatcagtttcctcggagctctgggaacccgggggtcccaaaggagagagactctcgggcaggggtgggatacactgtgggccctccacagtcagctctttggaagctgtcaggaggcacccctccaccccccagtttagaaaaatagacatctgtatttttgcatttctgttctccctgcctgactgctgatggcagcagtgacccccatgtgatccctgggccctgagtcacagccgccatccaccccccaccacctttccaagtcatggcttcattcagccctaaatgggaacacacgcctcagaccccaccatgccctggggggtccccacatacgcacactcacacacccacacttgcgtggccccccgatgctttgggggacactagactaggcacagcaacagagcagcaattggggtgtctgcagagcctgcacccccagagcaggcagacccatcctcctggctccccagctctgcccatgggtccctggggcctccctgaccccatggcgcccagccctccatcagcccctccctgagtgcaaaccttggcggtggctctgctaagacgaccccaggacccacaagtggacagagggacggagggaggccagcagcatcgagaccacaaggtctcaacagtgtggaatgagcagcagcagcaacaaatgggaaaccgaggacatcgcaaagaaaagtctgacgccgctgcggccgagtctcaacttggagcacagaaacacagtggcccccgacagctgagggcctgaaatagcagggcaggcctgggggcgctgaaagccctctgcccccttggctctgagcagctgtctgggggcaccagctggagttctcaaaatagccacctgggccaccctgtttgcttgctggagcagagaccctgcccaaggaggagaggctggggaaaggggtgcctaaacgtagagccagagaccagcagaggccacctgcccattccccacgccctcagaacgcagctgcacctttcgacgacctctgtaatactgcaggcaggacccagggcagcggctagaccctgggtgtccgaggagagggaggcacaggtttagaaaaaagattttgcttctcttttgtacaaaaatagactcaagtctcattagcagtagctaaaagtggctgtctttgtataaaactagaaaaggcaggcgcgccaccccaagggcctaggagtcttctggcgagacaggaggctgaaccccggaggctgcagccagggaggaggcagtgggcttcctggggagcccatcataagcagggactgctcaggaagcgcagggagggccgaggtgggcttgcagccacccgccagggccagacgtctgcaggggctgccctgaaagccggcggtgctggctcagatgagcatcttcctcgggtttatttttttaaataaatcctctctcaccgccttttgctcccccgaccctcccagatccccgccatcggggagggcggctagggccaagcctgcagctgccgctggtcgtactcggcgatgagcctcttgatgtgggccagcttgctgtgcaggtactcgcagcggtgcttctcctggctgtagttggtgttggtctgtgggacagcacagtcatgctcaggacagagccgccctgggtgctgctccccgctgtaagcaggccagtgtcccccccaaaccaaaaacctgggcttggtgcccagcaaggagggttgtggtccaagggcagagtgggagttggtcccccgcacctccacagcttgtgtggctgggccaggatgccacagctgaagacttagctgggggtggtggggcaactttggcctcagactcaaaggctcttcccccacaccttggaagtagcgggcagggaggctgccccgggcccaccctcctccctccagctcccatggctcacttggagcccaccccaacacaagagacactcacctttttgatttttcgatattcctgcaaaatctgccctcgagtagtctagaagaaaaacaaaattttgagaaaacagaatgtgtccccgcctacaggaaacccaaattgagtggtcccaggtgctctgagaagggggcatgggagggtggggcagcctcaaggacaaggccaagtaacaccccaggggcccacagcggctgtagctccggagtgggtggggcatgagggaaaggctgccgggtcccctggaggcaatagcaggtggggcactgctgttgtgggggcgtggcaggacaaggaagtatccatgtcgtgggggggtggggagggggtgggggggtgcagcaaagagggagggaaggggaaggagagatgccccaagaacccgtggctcgcagcccctagaaccccatcatgagtcgtcgtctttggaaggcaaaggggccttggccaggagagaccccggcatctgattaatcagggcccagccctgtagtcaggtcaccagttccgaaaggtggcaggtggggcggctacgtccaaggctaggctaagggtggagactctctgtatacacagggcagctgaatgagctgtgagctcaagccaggggaccacaggagtcctgattcccaggaccacagggacctgtcacctccccctgctatagttgtggcagcatggatgggccccagggtgctggacagagctcagctgcggagtctcctgagggtttggcacaggtaccaagagccctgtgtcctaggctgtgagaggaccccaggcgctcaaacatgtggggatccatgtaccccggctcgcccccatccaaggaggtgggtcacagctgtccccactgcaaaggaggctgacaagctgggctgccttcaaggactcccacaacaggaccccagggccgggccagaaccatggggttgctgcatggagtgcaccagggggagaagcgctgcctggggaagggccagactctggggccaccaagctcgtggtggcgatggtgcgcgcccaagtgggccctggctcccgccagagccagggcacagtaggcagcgggggggctctacctcatactcctcggagccctgggagagctgccggagctgggcgtcgagctgggtgaaccgccgcgtgatgcgctcaatgcgggcgtgcaggtcgcggtactcgctgtactcggcattgaagtcgttcttgtagctctggcgctgctccgaagaggagatggctgcgtacttcctgaaacaggagagaggggccactgagtggaggctggaaggacccagccccacccaggaagtggccatcctggctccaccggcggcctggcctctcgggtgattccctggattatgagggggcctggcccagaagaggctgctatgtttggaattcacatactcagacttgcagtggcttctacctctgataacctgcagtgctgggggagggggtctgaacccagaaaagggaggcctggcctgcagggcccagacaaacactcacagcaagtagtcaggcgtctccgacgtggacgtgggaacactggaaacgctgcaggttccgtttaaacctacgagagcaaacacatacctcctgagtctgcgcccatggcaccggtcggcaggaagcacgccaggatggggacatgcatgaaaactgtacactttgctgctggagggacatagagggatagcagaggggatgactgtgtggcaggtgcaagggctgagcccctcgcacctggcaactgtgggctgctggacctgggcgtgccctccaggtggtgagcagagctcagcgtgcacctgcgtgtccagggcaaagccctgcaggacacagagcacccaggcatcaccacagtcacattcttggcaaacagcggacaggtcagggaactgcagggccaaagcctgcacaaccggtcagagcttcccccaggccaggcccttgctgcctccactgactgcatgtcaaaggtcactaagctgaaaacaaatgacccctggcttgacctgagtctctggggcatcccagtctctggccagacaggacaaagacaagatggccagcagggcctgcatctcttgctgctgacaaagttccacgcccttggtctgtgccccacccagatcatcccgtcctttccactagacactgaattgcacgctccacaaggcagctccaggacagggccagccagaggagcccatgggccaccccaatcggccatccatgagcaaagtgtccatgatgacgctcagcccttcgccccttcaggggcctgcccaaagcagcacagctgatggctagatggcaccccaggcagctgtcctgctcctgagccatgtggtggggtgccccggccacataagacaacacccctgagggtctggaaatcagggaggggaggggcaggaagactgaagtgcgcgtcgcctaagaccacaactacaatttagtgcgttttctagaccttcttgcagtggctttctttccgatacagaaatgattttatcaatttcagatgtatcctcaatacactttttttttttttttagagacagggtcttgctctgccacccaggctggagttgcaatggtgcgatcatggctcactacaaccttgaactcctgggctcaagtgatcctcttgcctcagcctcccaagtaggtgagactacaggcatatgccaccatgcccagctaattacaaaatttttttgtagagatggggtctcactgtgttgcccaggctggtctgaaactcctgacctcaagcaatcctcctgaactggcctttcaaagcgttgggattaaaggcatgaaccaccacacctggcgaattttttttttttttttttactttttagtagagatgaggaggcttgcctatatcgcctaggctggtcttgaactcctggacttaagtgatcctcttgacttggcctctcaacatgctgggattataggcggaaccactgtgcctggccctagtgcacattttcaggggccctctgcactatcccctgagagagcaggagtctgcgatctccagtttgctgagccctctctctcagtgtaacacacctgggctgaccacagcagcttctctgctgccaaattcccaaaagtggacgaagctcactccccacaaagtttctaacactccccactttgggccagacactgtcttccatatcaccaccacccccacctgggttgtctttaagaggctgtggccttcccagggacgcaactcaatgggcatgtattgaatgggtctgaccctggtccgggccagaaggaagtgagaggcaaggcgcagctgcgaaggccaagcccatgctcccgccacgcagtggactccgtgggtattctacaacagataactgccatgtgtcaggctggtcaacattacctcatttgacatgccccaagatcttcaccagctaggatgacaaacggggaaatcaaggctcagggtcagctcaacctggtaccagtgggaccttcaaagtccagcccttggcaaacctcagcggcccccgactcctactcaagctctggctgtgtggggccggccaagctggtccctgcttcggggccccggagaacacccccacagcagctcctctccccatctctccccttcacagcccacgtctctctacttgcttgtcctgggcacgggcacaggacagctaagacatgccctgcacaagtaccaccttcaggactctggtaacatggaccaccagcaccaggctcagcttctggtgcctccactgtccttttcttggtgcttgggacatctacccctgctttgcattttctcacctgtggtagagatgacagcccctgggccggggatgaactgcctaggggccaacacgcaccaggccagacaggaaaccaccttgagtccccaggcctgtcttggcacctaggcactgggcatccaaggaagggacacagcccagagtggtctgtggaccctggagccgggccaagggtctcaaatggcagatcctgccatttgatcgtggcccaggtctggctgtggggtgtgggtgtgtcctgggaatcaggagtcctgccctgagcatggccctggtcagagaggctgcccagggagtaaggccaccttctccccgtcggcccccacatgcagtcccacgggaggtgggaagcccagcacgaggcagggctgacccaaccccgaaagtcttccttcctatccagtaagacccagccacagttgtgaggacctgctctccagccacagcaggggacggggcatggccctctgagcaacgcaaagctataatgaaagaagggctcccaccctcatcccaggaatcccctgactcagcctcctccccagagacacaacccaaaagcacagcaggtgacaccacctgggctgccctgggccagctggcgccgagagcgaagtggccatctgcaactggccgccatcgccacatgggaccactgcagcccctgtcgcacatggtggtggaacagccgctgcacgctggccactgcttctgctggttcctataaatgaacagctgcgcaggctcatggccacggtgctaggcgggtgctactgctgctcagtttaggtgcctgggctgtggtctcggagccgcccaggtctcctggctccccaatcccagcctgccaggccctgtccccacagcagaaacctacagtccacaacagtcgcacggtgcctacagaggtccaggtgctatccctctcccaccaggatctgcccatctgcacctgtgctgcctctccctgaatagggctggcttgcctgggcccccactgtcttccctgaaccccagcagacctcagcatggccctggctcctggggcttccctgcagtcagagctggggcctgggccccattcctctctgcatgttagccccttctgcggcctcagttccccacaaggctctgggcctccggcccccagtgctggcctggcacattgactgcaagtggcaccgggcactccagacaggcagggagaggaccaggtgcaggaacatagggtgccaggtgccaggcacacagggcaaatctgatggggcctggggcaacagggtcccctcccctggcttctacagcttgagccccctcgacaccccatgagggtgaggcgggtgtggggccagtacttagagccccggcaacgccctcctgcctgggcacctacctggggtgtctgctggggctccgggggtggcatgggtggcaggtgcacagtctggaagctgggcccggggcttgtcctcagccgccctctccttgtctttgtgcttcttggacttcttcttgggcttgctgcgcgaggggctgccgtgtggcctgctgggctgggcacagtccgtcagcaggggcaggccgaggcgcacagtgggggctggggcagccgcctctccgtgctcacagtctcggccgctgtggcccaggtcattgctgacatcggccagggggtcgtgggccctcgggggctccagccgcgggggcaggtgagtgctggagctgagggtgtccgtgctggctggtgggcccggggtgggcagcaaggcctcacggccattgggcacgcccagcttcccgttgacggcaggctgagctctctgagtgaagtgcgatatccggggtttcttgttggctagggggtcgatgaaatcaggaggctgcagccgcttctggagaggagcagagatcattttagaggggagcacagagtggctgagcagcaacaggcaatcccctggcctggctagaaaacccaacgccgcctgcaaggcccacgctggccacatgggggcgcccgagcaccaagtcaggtcccaggtgccgctcagggtggcctcagctggggcccatcagcctgctgggatcgatgcagggggagggcagggcccagtgtgtgagcgggccacccctggggactggtctaaagcgctgctgtgctcagcatgcttccccagtgataactgtgacacaggagcaggaagcccagggttgagcccacatcagggagccgccccccgtcccaggttccgcactgtgacactggggtgctgcggccacactggcaggaatctgcccccaaccccaacccgacagcttcccccttggtccctgggcggagggaggcggctcaacttggagcagctcatgctccaaagagctggtgaggaaggtgacaagggttactgatgcagcacagagtgccctgcaggtgcttgggacagtcaccccaggcatgcctcacttacctgtgggggcgaggccgagcgcccacgctcgcctggggggctggaggcagcagggtctccaaggaggctgccagtgctctgtggctggcacagcttcctgcgaaggagaggcagggctaggtcagaaggtgctgagggggcctaggggccccaggcctgtatccacatgggggcccggtggagatgcctcaaggaagggacccccctcctcccaaatccagagcagggccaaggggtcacaggagcctgggcctgaggccatcctgcccccgacttcacccaaaggaggacttccccactcactgtccccctgagcccagaggaggatcactttgtgtaggtgcctgctaccggagagaccagggacacacgctagggtgctggaccctgcttttaaagacagctgttcatcctgttcagaacgctcactgcagaaactgtccaaaatgcagaagagaacggagggccctggcctaggatgagacagccttcctggaagcccaggtcacagcaggatctggagggcggcagagtggccaccagcttgactaggtgatgcagctggggaagaagggaagaaacaccccagtgcatgccccttctcccgctccatgtgatctgggcaagtggaatcccccacccccgccagcaaccctgcagcttatgggtatcctctctgacccaactgttcaattcccgggggctgtgccatctcagggcagcctagcgcccctccaggccctgcagagagacttaagtccagggccgtggccattctgccagccagtgacacccagagcccatctccctaacaaatgggctaggctacagaccactgcaggtgtcacttccctggtggcctgagaggagagccatgtggacataaacagaactcccagttaaagacagaaaactgagaacaggcatttgcatccactggacaggcaaggcagagacaaaaggaggagtgaagacaccggaaagcatagcagaagcatgagtggtgactgctgcaggatccagagaatccagggcccagagcaagaggcaccacgacctcaggggacaacagactgctgcagggccatcccccacagctctactccagatcctcatcactgctggtggggctgcaggacagtgagcccagggctgtcaggcagcaaagaggctcgggccactcctccaggcagttgggaagttacctgggccacagctggacaacaggatggccagatgtgtggcctcaggagaagaagaaacagggcccaggactagggcacatcgggattcagaggccccaagctgtgcagtgtccccaacggctgcactgcagcttccaggcaacaaacgtcagacctcaaaacagaggaacacgaaaatacatttgaaaagagactccacagggagatgaaaacgttaaaaaataaatcaacaggccgggcgcccatggctcacgcctgtaatcccagcactttgggaggccaaggcaggcggatcacctaaggtcaggagttcgggaccagtctggccaacatggtgaaaccccgtctctcctaaacgtacaaaaaaattagccgggcatggtggtgggcacctgtaacctcaattacttgggaggctgaagcaggagaatcacttgaacccgggaggcggaggttgcagtgagcagagatcatgccattgcactccagtctgggcaacaagaccgagactccgtctcaaaaacataaaataaataaataaaaaatgccagttttcgtgtccttggaaaaacaaaagctctgaatagacgtttcttcaaagaagctatacaaatggctaaaagcacataacaagatgctcaatgccatgtgtcatcagggaaatgcaaatcaaaacaacgagacactggctactctgggcacactgcctatgggttagccctgccctgcaaggagcaataatgaacaaacaaacccaccaaacaaaaaacaaacaacgagataccacttcacacacacccagggatgactggaataaaaaaaacagaaaataggttgggcgcagtggctcacgcctctaatcccagtcacagctcactgcagcctggatctcctgtgctcaagtgatcctcccacctcagcctctagggtagctgggatcacaagagcacaacaccatgcctggctaattttttcattttttgtagagatgagggtctcactatgttgcccaggcttgtctagaacttgagcccaggcttgggctcaagcaatcctcccacctaagcctcccaaagtgctgacattataggcatgagccaccacgcccggtcctgattcaacattcctcacagctacaagtttccacagattacatgtcagccacacagcgtataattccattgatctgaaatgtccacaacaggcaaatcaatagagacagaaagcagattagtagttaccaggggctgggagcatgggagggaatggggagaatgactcctgatggggatagggtttccttttggggaaatgaaaattttctggaactagacagaggtggtggctgcacaatattatgaacgtacaaaatgttactgagctgctcactttaaatggatgacttgtgttacatgaactgtatctgaataaagctgttattctttaaaaaacatccttagaggccgggcccgatggctcacgcctgtaatcccagcactttgggaggccgaggcaggtggatcacgaggtcaggagatcgagaccatcctggctaacacggtgaaacctcatctctactaaaaatacaaaaaattagccgggcatggtggcgggcgcctgtagtcccagctactcgcgaggctgaggcaggagaatggtgtcaacccaggaggcggagctagcagtgagccgagatcgcgccactgcactccagcctgggtgacgagcaagactccgtctcaaaataaataaagaaataaataaaataaacatccttagagtaggttaaaaatgacatcctgggctgggcataatggctcatgcctgtaatcccagtactttgggaggctgagatgggcagattacctgaggttgggagttcccgaccagcctggcctgcatggtgaaaccctgtctctacttaaaaatacaaaattagccggtcgtggtggcaggcgcctgtaatcccagctactcgggaagctgaggtaggcgaatcacttgaacctgggaggcagatgttgcagtgagcagagattgcgccactgcactccagcctgggcaacagagtgagactcagtctcaaaaaaaaaaaaaaaaaaggcatcctggctgggcacggtggctcacacctgtaaacccagcactttggaaggctgaggcccttgaggtcaggagtttgagacaagcctggccaacatggtgaaaccccagatctactaaaaatacaaaaaattagccgggcatggtggtgcatgcctgtaatcccagctactcaggaggctgaggcaggagaattgcttgaaccggggaggcagaggttgcagtgagccaagattgcgccactgcactccaggttgggcgatagggtgagagtccctctccaaaaaaaaaaaaaaagaaagaaagaaagaaaaagacatcctttccattaaataagaacatgatgagttaggccaggcacagtggatcacgcctgtaatcccagcactttgggaggccgaggcgggtggatcatgaggtcaggagttccagaccagcctggccaagatggtgaaaccccatctctactaaaaatacaaaaattagccaggcgtggtggcgggcacctgtaatcccagctactcgggaagctgaggcacagaattgcttgaacccaggaggcggaggttgcagtgagccgagatcatgccactgcactccagcctgcgtgacagagcaagactctgtctcaggaaaaaaaaaaaaaaaagaacatgctcctacgaaaacgcaatggggaagactcttagaaactagaaataataggccttgcatggtggctcacatgtgtaatcccagtgctttgggtggctgaggcaggcagatcacttgaggtcaggagttcaagaccagtctggagaacatggtgaaaccccatctctttgcctaggcaacagagcaacactctgtctcaagaaaaaaaaagaaactacaaataatagtaaattaagagacaggatgagaaatgtcaaagaagtctcctaaaaggagaataaaaaagagcaagagatgaaaaccagctgggcgcggtggctcacgcctgtaatcccagcactttgggaggctgaggtgggcggatcacctgagatccggagtttgagaccagcctgaccaacatggagaaaccccatctctactaaaaatacaaaattagccgggcatggtgcgcatgcctgtaatcccagctactctggatgctgaggcaggagaatggcttgaacccaggagacggacgttgctgtgagccgagatcgcgccattgcactccagcctgggcaacaagagcaaaactccatcacaaaaaaaaaaaaaagagatgaaaaccaggaagaggaggacagactctagcagcctgccaagagcagtttgaggtggtgtgcagtaggataggcctttccactaccacacacaggacagaaggacggatagacggataaggcaagttttcagcctgcgggggccgtggtgcccaccatcccagagtaggtacctggccagcccctggctctgtggaccagcacagggttggggtgggaagcctctgaccttcaacgtggagggaaagcatcttggactctacaagtctagatgtgatcaaccgccggctcagcaggaccatcgtctgggcatgaagatgtggccagcagtcctcctggagccctgtcctcagagaggtgctccaggagctgtgctcccttggcaccagggaggagcaggaaggaggagtatatagactctggcatggggctcacaggagaggggagtggctcaggttggaggtaagggcaccaggcagtgtgtggcttgggcagaggaatcaggaactcttggggggacctgcaggacccctgacccatggacagtgatgagaggagatttggataccagggacagatcgggtttggacatcatgaacaaagagaacatgagtggagaaaccaccccccaaagccacatgtggtgccagctcagctggggaggctcctgcagtgacttgggcccccacatcccatctgtctcacggcctgcactaggctaacggcctgcactgggctagcccagctggtaacaaatactccaaggccctgctttgatatacacgaagccatggtgtcaaaaactgctataaatggggctttcttagggatggggtgctaaataggaaaaaaaaaaaaaaacagctatgcagaggggcaccgcaggtcaccttctatgtggttatggcccagggacatcaaccctgccccctgcacgctagtggaagcttgtgaaggcagtgctgatccccatgccggcccagagtgaaagcagagtgccaaggggctggcatgagcccagcaagctcactcagcagacggaacatgagccttgaatcaggggagctggaggcggctctggagcctgcatcccggggaagctccccgacgccccagaggtgcagcccagccttctccacctcactccactagctctgggcagttctccttccagtgccctaagggtctgaggaacccagggggccaagggagaggacacagggtatgaggatgggggcgggtcttctgccaagactgtgccctccgccagcctgccgccaagccagggcagtgccccgcaggcccctgacctgcacacccagggtggacaggcaggcactaccctctcaggggagcagagtggacccccaacttcattctgctttccagaggcaattactgctttaaacagctgaacttccaaaaaacaactacaaactcataaatacctccgagtccctgagaaatcacttacggactaattagcagattgacctgcttcacagcccgagctcccctagctggcagcagtggagaaggaagtcattagccgcctgcctccttaaccactgctcccctgagctgctgccacttctgaccctgggtcccaattagcctgaggggatgcatttaattaacgctgcttaatgacgcctgccctgccgggagtgtcgtttggccttatttctctctacttcaggttcttgagaggctcttttcaaaaagtcagtgaacttcccaggccctgtggggatgcccaggttgtggagggaagcatgaagggaagttggggacagctgaggagggtctcagcagactgaggccttttgtctgaagattccaaggtcggggccagtgactcacacctccgtcccactctgtgagcgtggccttcccccaccacgggacaccctggggcaccacgtgggcagtagggaggatggccagagaggcctacttggacccttccatcctgctcccaagccctgtggccttcaggaccacacaagaccaccccagcatcctctgggtaagctctggctgccttcatgcgggtggggacatgctgggggatgggaggcggcattaccggacgagcacccgcttcagcagctgctggtccccctccgagtagccaggccagtccttctgcacatccttgtacatgcagtcctgcagtgtacacgtgccgtccttagcactcatgttggccacctgcaagacagagccagccatcactttgtgggaatcctgagagagacgggggactagagaaaaaagatctgatagtgggtttgggagggtgtgcagagacagtgggagacagacagagacagaggagaggaaagaggatggcccactaccgatccgtgatgtctcccacccccagttcccccgcacacaatcctcagggtgcagaagggataatgagggtcatgaaggcaggtccagactcaactgtcttagaggtgctggggccaggctggctccaaaaaggggagggctaccacctgcagtactgagaccccatcacctgccccctggcccctctagcctgctttttttccttttttgatacaagatcttagctcactatagcctagacctcctgtgctcaagcgaccctcccacgtcagcctcccaggtaggtggggccacaggtgtgcaccactatactccagctaattttttttaagagatgggatctcgctatgttgtccaggcttgtcttgaacccctgggctcaagcgatcctctgatctcagcctcccaatgtgctgggattccagccaccacacctggctcctatttcttccaggctggagtgcagtggtgtgatcaaggttcactgtagctgcaaactcctgggctcaagcgatcctcttgcctcagtctcccaagtaggtgggctataagcatgcactatcatacccagctaattttttgtatagataggatctcagtattttgcataggctggtctcgagctcctggcctcaaggatcctcccacctcagcctcccaaagtgctggaaacaggcgtgagccaccgcgctgggctccaccccatttctgatcacaactcccagggaagagtcagccacggctggggatgctgggtgaggggtacctctggggccacgtctgagcccaccttccctacaaccagcctgccttgctgttgccggttgaccaaagctaagttcgtctcccagactgctaacaaagatggattcagaacgtctgccttagagggatctgaggaagctccaggtcactgccctgagtgggtgctgcgtgctggcctacagggcactctggtctccatcttgctgcaggcatagcagtcactgttttctgctgcatctgacatggctctgcgtcacagcgtatcccatggggagcattttttttttttttttgagatggagtctcgctcagttgcccaggctagagtgcaatggcgctatcttggctcactgcaagctccgcctcccgggttcacgccattctccagcctcagcctctggagtagctgggactacaggcacccgccaccacgcccggctaatttttttgtgtgtgtatttttagtagagatggggtttcaccatgttagccaggatggtctcgatctcctgacctcgtaatccacttgcctcggcctcccaaagtgctgggattacaggcgtgagccaccgcgcccggcccatggggagcatttttaacagttgagtaatatcccacccccaaactgctgccagtttctctgtagcataaacagacattactgtgtgcagtttttttcaggttggcaacagtttccttcgacgggattcccagaagccagattagtaggtcaaaggctgaatatttttatggctcatgacaggctttgctaaatattactcagccgtcaacacccctccccttgaaggataggcttgcgggtttccctggggctcagccagtcctagaggtggacaccttccatctctgctctagatttttccacagagggagggccaagcacctttgaggcatgcagttttgtcactgccattcctcagcatgtctgagggcctgtgaggggctggaaatgaccagtctgggtgaggcacatccccctcctcttctacaagccaacagtgtcctgctgacccccacagctgcttggggggaagcagctgcataatgaatatagaagcaagaagcagacgagctgtccaggggaagtcacagtggcacaggaagggacaatctgcctgcagatgctggccaggcctgctcccaggaggcactgaaccaaagtcacctggagaagccaggcaccagcacagacacctcctggccaggccaatgcaggtcccacatctgatgactccatcgagctcccttcagcaactcctgctggcaccatgccagccctagccttgggagcaggatgggggtggacgagggccaggctgacatcctcccaaggaatgtggaacagggtcccaccagccgcgcacccgagagggacgcctatgaggagctccgtaaacatggaagaacgtcctttatacagctgctatcccggcatgccacagcatgtgctttttgctgcaggcatcacctgtgttcctgaggtgctggatgtgaccccgaacatcccacttccatcatcctaaaaggtgcaagaggctcagccatgtctcttcctccaccacagcagcgatccgaggagacccatcctcagttcacctcaaggctgcatctgcatagcctggctaatgttctgaagccagtgcgagtcactccccttcccagggaccccaggaagccaaggtggagcctcaggaacctccatgggtgaggggggtggaaggcagtcagggccatcgcacctgctccaatgcccggggtgtttctcaagagcaggctccactcgccagcaccacattccagatggcctagcctccaaccccagggaggggcactgcaggtcacagatggaagcctgatggtctgagacgtgaagcccctcacccggaggcgcaggtggagggcggcaggcagctgattcacactgaggcctgccaggctctgccaggcacgtgtagattccttccccaggccttgagtccacaaatcgtctgcaactgaagcctgaatccactgtgccaggccccacggcccgtgtgtcagcagacagtgaaggagggcctgggctccatgctgagtccacctctcaaccctggacagtcggggccatgcccagaaacgcatccatggccccctaagcttgttctaatccaggaggccctggctctcaggcaggttctgaacctgtgagagaccccaggaagggctcttccttgccagtcccaatcccagtctccatgctctggcccatcccacccgcacaagaccatctgcggagaccactggtaaagacaagacatcggggcggcacccacctgctggaggaggccatccagcgcgtccttgtccgcctgcgtcaggccgtccttctgcagtcgcagcagcagctcagccttgcggtagggccgtagtgccaggaggtgcagcactcggtcacggaagggcctctgggacaccccgctgcccccactcacggcactggcaccactcttcctgatggcactcgccaagttgatgggggttgcccgcttccgggagggcaccgcgtctgttgcacctggggctggtttccgaaactgaaccttcttgcctgcaacaagaatccaagctttagggaacagagagggcgctgccgtgtcctaagccagtgctgctgaccaggtgcccagaggtttgagactatagacagtgctggtgggaggcaccacaccaaccacagcaaaagccagcttgctccttggggaccctgggcgaccaagagcgccacctgctgcccaaggcaggcacctgcagggcacccagcctcagaagtgggaggtgcaggcggcagaactgtgttagagccttacttacttcatcacaggcaacctaaatcctggacagcaaaatcacctgatcactctcactctggtgggcagtgtgtgtgtgtgtgtgtgtgtgtgtgtgtgtgtgtgtgtgtatgtaatcacctgatcactctggtgggcagtatgtgtgtgtgagaaatcacctgatcactctggtgggcaatgtgtgtgtgcgtgtatgaaatcacctgatcactctagtgggctgtgtgtgtgtgtgtgtgtgtgtgtgtgtttgggcggggggcggggggggaaggattgttttgttttttgagacaggatcctgctctgtcacccaggctggagtgtaatacaatcatggctcattgcagccccaaacttctgggctcaagcgatcctcccacctcagcctctggagtagctgggaccacaggtgtgcaccaccatgcctggctaatttatattatttgtagagatggggtctcactatgctgcccagactggtctcaaactcatgggcccaaaggaccctcccacctcagctttccaaagtgctggtattataaaccagagccatcctgcccaacctgaggcaggggctgtttgtaaacccttctgatgttaaactgggggtccctgaactgcaagaggcagtcactcccaagcctgcacttcagagtcctatgctggccccatgtggctgccatttttgtttttctaaagtcagtaaagatgtcggagccactttcagcagctgctctgaagaccctgaggtgcaagtggcaccccagccttaggcctggtcaagctctcctctggcaggcgtggctgtgcccagagccctggggagagcaggttcccctctatccccaacgcagagacgtgggcagggtccagcacgctgctcccctgctctgtcctgaacaatgatgccccggcatccttgggaacagggtcggccgagcaagctcaacagtgcctcaaatccttcccccaaaagctcttcgtaacaacatcactctgatcttatctctcaaaatctgatctgtcaaattaacccagaaagccttgctttcagaatacccagggccagtgctcacacctctggggtctgttcagtggggtcctgacagcagggctggactcacccatatagggccaggctgattgacagggaggaggagcaacctgaggggggcactgtgagacagaggaacacgcacattcacatctttttttttttttttttttttttttttgagacagagtctcactctgttgcgcaggctggagtgcaatggcacaatctcagctcactgcaacctccgccttccaggttcaagagattctcctgcctcagcctcccgagtagctgggactccaggcgcacgccaccacaactggctaatttttgtatttttagtagagatggggtttcaccatattggccaggctggtctcgaactcctgaccttgtgatctccctgccttggactctcaaagtgctgagattacaggtgtgagccactgcatctggccacattcacatcttaacagacagcgtcccctaccagaacataaactgtttcaaaaaccctcactgggccaggggcggtggctcacacctgtaatcccagcactttgggatgctgaggtgggcggattacgaggtcaggagatcgagaccgtcctggctaacacggtgaaaccccgtctctattaaaaatacaaaaaaaaagaaaattagccgggcgtggtggcaggcacctgtagtcccagctactcgggaggctgaggcaggagaatggcgtgaacccgggaggcggaggttgcagtgagccgagatcgcgccactgcactccagcctgggcgacagaccgcgactccatctcaaaaaaaaaaaaccctcactgtacccaaagtggtgtgctaagatacatttctgatcaagtttttggctgaaggacccacagatttattaacatgtatatggggccaggtgcgctgactcatgcctgtaatcccagcattgtgggaggcccaggcgaaaggatcatttgagcccaggagtcagacaccagcctgtgcaacatagcgaggctctgtctctacaaaaaatctaaaagttagccatgtgtggtggcacacacctgtggtcccagctactctggaggctgaggtaggatcacttgagcctaggagtttgaggctgcagtgagctatgattgtgccaccgcactccagcctgagtgacagagaaaggtcctgtctttaaaaaaagaaaaaacaaaaaacaaaacacgctgtctcttcaactgttctccccacagcagccctgtgcttggggcttacagcccagggcctcaacatcatggacaacccgggctccctggccatacaacatgtccacccggactcagtgttgaccaggaagaccaacccctgcacccacatctggggtttcactcagagggaacccctctgctcagcaaagggaaatcacgtgctttcttcggaaggaggagagagaggaattgaaatgcccccgccttttcttaaagataaaactcaaaaagccatcaaggctgtcgtctgctctgagccatctccctcctccctgaagcccggcaccctactcctgccgtaatgagttcccatgactcctggagctctgcctggactaagaggcggggtgctgcagctctgtaaacaaacagcactgtgcttcccactgtcaaggcctgttggcttctcaactgctgaaaccgtttccaagttgatgctgagtggccagagctttcctgcagtgctgggtcgctggcaacagggcctgtgaggctcatttcctgcctgttgccggctgtggtggcgttgggcaggagctggctggtcaggtgagggtgggggcagcctccagagacagacatgggccttgccctaggctgcatgcccatcttcagggagcctgttgatctccctgacaggtgaaggtccccaaggctgcagcctgaaagcagggaccaccaactcacagctcctggagttctcaggcccctttgtccacctcaggcttcacaagccagcagctgccataacccaaccccctatccctcacatagcccccaggcccatgtggccatacctctcttcccaacccagactctggtccaggcacgtcctgctcagggaccgactcctcggttgacccatcatttctgtgcagggcacagccagtgcccagcctggacaggccccaaatgtctcccgacactggcagctgcccggctgccctacagccctgccaaacccactgctcacccaggtagcggcctccagccttgatgacaatggcacttcggctccgcgtctcctcctccgcctgggccatgctctgccgcgccttctggtaggagtcgtcggtggcacacaccgtgatcttgtcctgtatgctgcccaggcagtccaggtgaacttccccatgactgcaagacaaggccaggagctggggtcagcagctgggacaatgcagggaggatccgttgagggcccaagcccccagcccaccacctggcctggaaaatggactctgtcaacaccatctcaggcaatatggtttcaatggggcacatctcaaccctgggccagaggtggcagggtgacctcaagagccggcggggtgctctggggtggggcggcgcctcacctggagacatactgctggatgcagtcgaagctgccctgggggttgtcgcggccgatgttggagaggtagaaggagaacgtccgcgcctctgcggggcagtcaggctgggggatggagatgtgctgcgtggagggggagggggtgtcactgggaggtcctcggcaggacaggtccccagcctgcatcttcctgcatgagtccccacagtgcaaccctcacaacaggaatgtgctggcccttttccctaaaacacacccctgctcttcagccagtgacgggacaggcagcccatcctcagcaacacacactgcgtagagaggggactcaggcacctatgcgggtgggcatggggccaggggccgttttcagcagcaacagcactgctgtctgaggacagtgctcagcacctgcccagatgcagggcccccaccccaatcgtgtgacccctggaaagtggtttgtctggaccatgactcactttccccaccaccaaatggacagacctggcctgcgacaccctatgaggtaaaatgcaacaagaggggcttgggcagccacgcgcaactctggcgcccctccttggcgaccccctctcagcatccccccacaaaggacatggactccacgtgagtctccatttgctgcagctgtgaatcaggtaggcttgtgtcccaggggctcacagatcagaagcactggcccccaacaagcctgtcatgggtcacaccagcctgactttggctgtgcccctgcagcccagctgggcaaagctccagccctgtctgggaggacggacagccaggggcaggcaggcggatggacggactgcgctggtcccggccaggctcagtgcagggcggcatcacatcagaggccattgcattccaggctgaccccagaccctctgtcaacagagttggcccttcctaaactaatgcctgggctttggcatgagctcctcacagttagactgacacatgaagggcgctcaaatagtccacaaggaggggacaacatggggggagccctcaggtcttgtcccctggctgcagcacccccttggcacccaagccccgtctcctcctctgtgacaccatgagcgcgggagagactgtggctgaatctcctgccccctcgcccctgctgagctgcctcatacgcccatgggaggctttgcctgcctgtgcctcacctgtgagacaggacggggctcctgccaccagacacgtggaggagcaccaatccccggccctgctgtgtggccttgactgggacttgtcccctggggtagtgtttggacacacaagggaagccatggctgcacccagcccagtgccagtccctgctcccaagacaagaacagttcctgggttcggccacttggggcaggaagagtctggtctgggcttgcaggcagtccctgtaccagccagtctgcccggcctgcagacccttctccagaggcccatcctgccccttccccaggctgaacactgccccaggaaaaaagccgtcccatctgctggggtctgcccagcatcccctctcagcctcgaacatgtccccctaaggcaggtgcccttgtccctgtcatgctgatacagaaacacaagctgaggggtcagggcccaaacagcgtgctggtggagggcaaggccaaagtccattgtgggcccaccatgccaggccacacctgaacacaaacacacatctctatcagggtcagagaaggcagaaacggcctgcactcagcatcggagaaatcacacacatatagcctctgatgattcaccctcggacagagaaaccctccccacccgcccccaccacacaaccacacacacacacacacacacacacacacacacacacacacaaacacaacccctccacacacaatctccccacacacaatcccccacaaccacacaatccccacacacacacaaacacaacccctccacacacaatctccccacacacaaccccccacaaccacacaatccccccacacacacaaacacaacccctccacacacgatctccctacacacaaccccccacaaccacacaatcccccccacacacaaacacaacccctccatacacaatctccccacacacaaccatacacacacaatacccaacacatagcgccacacatacaaccaccccgacagcaccacacacaacctcccccacacacaaacacaacccacacacacaacccacacatgcacaacccccacacacacagccacacacaaacccctccacaccaaacccctccacacacaaacccctacacacaaccacacaaacacaacccagacataaacccccacacagccacacaaacacaactcacacataaccacacacacaaccacaacccacacaaacacaacccccacacacacaaacaatccatacacacacacacacacaaacacaatccatacacacagaaacacaacctcccacacacaaacaaccacacacgccctgaagcctcagccagagccatgtgggtgaccctggccatccagatctgtcctgcttcgacgccactgaggtgttttttcacccaacacacacaggtgccaccctgccctgcctgcacctcccttcccagatgtgacttttattctcgttcatacaagaaactggaaacacgctgctgggatgagggaagctcaagtttgtgagaggctctgtggtggccaggtgcacaggtgacatggtgacccagaatgagccagccagggaagctggggaccacacgtccagggaaaccaaaaagagtggctgtgggaacctgagcctggcctgggtggctctcccgccctcctctgtcatctctttaacccccactgccccctgtggtcctggcctgaggcccaagttgccagtggctcctgccccacagtgactaagggctgggcaccctcacgtgcagccctgtcccaggaaaaccccagctccacccaggttggcaggactcattctgtcaccctggcttcaggggagatgccactcagcagagagctggcagtgagaccaggccactgcctgtggcctggggcagctgtacacccagtcagcactgacagggcccccctgcctgagcctgcccagcaaccttgcttctctgtgggtaggggcttcatagtggcccttcaccctgcttggatcttttccacacaggtgtagacatctgccccccaaactccatcctagaagcaggggccaggtgcagagcccagggccaggtgtgcagctgtggcggggagtaggggctgcatgaaggggggtgacacaggcctcaaagctgatgctcgggagagtgtcgtgctgctggcgaaaaggggaagacacacagagggcatggcggttggcgtccttcaggatgcaggggtgagaaggtggggagagtgttaggaaaggtttcccggagccagacaccgaggttctcacaggccctgcctcccctagcacacgaagcgctatggagccctctgattaacgggctgttttgctgctggttaatggttaccagcccgggaccgtggggaagccagcgggatgggagcagcccaggaatgcggccactttcttcgcactagccaagagcttgcccgggttctgggacaaggtttgaaacgcagcccctgctcagccttctgaatggggtcttggttgctccttggggactgctcatgggcccagtgacccacgtaccagtgggctgccatggggccctcagatggcccacgcacagcaggtctgggtatgtctgaggtcagtcccggctccaggttatagggtgtggggaggagttgccataaacctaagcactagtccatgctcacagacacagagcccaggccacaggggctcatcctaggcgcttccgcagggcccaaaggcccgctctgcccttcccgctgacctgaccatggccaccagggggcgttgcttccaccaccgctcaagtccctgccagagtccgttcatctcttccctttgaaatccatcccaaattggggcctgctgcactccccacctgaccccagacaggagcttgggcgatgctggctgactggatccatgaaggaacaccatccagggggcgttccgacaacgatgagcccagtgcaggctctgtggcaggctgccggcagcatggcccaggaccaagagccccaaagctaacagcccactaaagtgaagcagctggccaggcgcggtggctcccgcctataatcccagcactttgggaggctgaggtgggtggatcacctgaggtcaggagttcgagaccagcctggccaacatggcaaaaccctgtctctagaaggaggttagctgtgtagccaccccaggtctctctcagtgacttgggcccctgctacacatgttattaggctccaggtcaaggcacatggcatgctgcacgcaaggacaccactgtgtgcttcggccatggccaggctgcagtgtgtcatctgacgggctcgctgagatgggggttggggatgaggggcccccccactgctcaggttggggtagaggggcatgggtggtcaggcagcagcagaaggcacagagtgactgctgtaggacaccagagggcactgtggggctgctctggcagcaagcccaggccagcccgcccctgcccccaacctctgacccctgagagaatgtcctggggaaggtaaaaaggaggtggccaaagggtgaccacaagacccaactggggctgatggaagtgtggggttgtgtcaactggctaggctgcagcccctggagattcattattccatgacatcccgtctaggggtgccctggaggtactctgtggacatggttaccatccacaaaccagatactgaaagcaagtaaaggagatgaccctcgatggtctgggtggtcccatcgaatcagcccaaggccttaagagggaaactggctggggtttggcaggaggaggaagaaactctgcctgaggactgctccatcagctcctactggaggtctgcagccagccctgagggttacagactccccagcccacagtcgtctgagcccactgcttgcaatgcatctttttatcagcacacacagacacacgtctcctagaggctccatgtctctgcagaaccctgggctgcacctggaagcccatggatcatcatgtccatatccccacatccagctgtgcagagctctcaggctgtggacagaaattgatttaggtacaacatggtaactctaaaagaaaaaaaaaaagttgggtgcagtggctcacacctgtaattctagcactttgggaggccaaggtgggaagatcatttgagcctagaagttcaagaccagcctggacaacataatgagactccgtctttacaaaaataaaaataaaatttgcctagcatggtagtgtacaccagtagtcccaactacttgagaagctgaggtgggaggatcccttgagcccaagagttcaaagctgaagtaagctatggttgtgccactgcactccagcctcggcaacagagagactcatctcttaaaaaacaaaacaaggctgggcgtggtggctcacctgtaatcccagcactttgggaggctgcagcaggtggatcacctgaggtcaggagtttgagaccagcctggccaacatggtgaaaccctatctctactaaaagtacaaaaattagccaggcatggtggcaggcgtctgtaatctcagctacttgggaggcttaggcaggagaattacttgaatccaggaggccgaagttgcagtgagccaagattgcaccactgcactccagcctagatgcaggggaacctgcaataaaggctagaagaaaaatcaaaccattctaaggcatatcgggtaggttaggggagatgaagagtcctaaaacagggggtcaaagaaggtagatgactcaccctttctctcattccctgatttttctataagatggtcatttagaagaaaacatatttcaaaaaaatgagggtgctgagtttctatgaacctctctcccaaccaaaatccagacaaatgtccaaggtccttgtgtgccctaatgcagcagtcccctacctttttggcaccagcgactagtttcgtggaagacaatttttctttttctttttttttttgagacagagtttcgctcttgttgcccgggctgtagtacaatggtgcgatctcggctcactgcaacctccacctcccaggttcaagcaattctcctgcctcagcctcctgagtagctaagattataggcatgcaccaccacacccagctaattttgtatttttagtagagacgcgtttctctacgttggtcaggctggtctcaaactccagatctctcaggtgatctgcctgcctcagcatcccaaagtcctgggattataggtgtgaaccaccacacctggccagaagacaatttttctatggatggtggaagggggacagggagccataggggaggatggtttccggctgaaactgatccacctcagatcaggcattagattctcataaggagcacgcaacctagatccctggcatgcgcagttcacaatagggttcgcgctcctgtaagaatctaataacaggctcagctgacaggaggcagagctcaggtggtcgtgctcactcacccacagctcacctcctgctgtgtgggcagttcctaaccagtccagtgctgggggttgggggcccctgccctatcagagtggaagctaggtgcacatcgctgcatgaagggagccactgggagaggagagccgcccattgcccaagcagcctgtgacgtgcacccgacacgtcctggtgtggccccagccaaggggctatcctgggggcctagaacccagccttgcatggtggcagacagggcccaaacactgccatgagctgctgctgtacccagcgagcaaggacagacctgagactataccagtcccaagattccaaatatgaatgattaagacaaaaacttaccccttggcttccttgaaatcggatagatggcctcagtgaaacagaatcctataaaaaaaaaaaaaaaaaaaaaaaggtgaggggaacatcaataaagacattgggaaacccaaagactccctccccaggtatagaaggagcagggtgaagatggtgttctcaggagaggggaaaggaaatgcacacactctgaaaattataggcaaggtcaccggagcagggttttagaaggatcagtaggagttcctcagatggacagagggctggggacacatgacaggtaagaatggggcctccagacacaggcaacaggctggcggaaggcccaggatgcaggggcggggagtgtgccatccttggaaagccaccaccagcctgtgaatccaccgggagagaagggcaaggctcaaggtgctcacagccctgccaggaaaaagcaaagacaggtcagggttgaccctggatcatgactctcccaaggacccatacaggcaaaagcagccccctccactctcacagccccagctgatcccctgaaaccaccaaccaggctaagtcctgtctcacaaacactggcttttaacaaccaggtgggtgagcactgtctatcagagcaggtgcggtggggccaccttggagcctggggtgggagcctgaggcctgcacagctccaccacacggccttggggcagtcacatggcttctggacagctggtcactgagcttggagcagtggaatttccaaggaaaaaatatacaaaagagctcaaaataaatactgacgcttcagctattcagagaccagccttctggcagtatctgagaaagaactgcgagccagaggaggactgcacctctgcatcttcttccctcttcccaacctggggccctaagcgtagatctcagtgtcccagatgctaccccacagcatagccctggctgatcaccatgattcttggtccccaaacccacccctgcaccacctggccccactgccccactcaggtccagcccactgagatgccctcccacccaggccttgctcctgtcctcatagtaccccgtcctgggctccgtctccactgctcaggtctcactccctcccaccctggtctgcccatagctctccccagagggcaaagcactacttgagtctggagaggcctgtcggaagacccggggtaagcggagcagctccacacctgcgacagtatcagagacaacacctaccccatgggtcagcccagggtccgccctctggagccactcagcactgttccaggactccagcttgagatggcacagggccctccaactgctcacatccagtgcccatcagttgggaaagacaggagctgctaggagcagcggaagccgcctgggacatgagagatggctggcctttcagcacctgctccatgtgtgccctgagccatgggtctgcttggccagcttagaccacgcagctgtatacatatgacatgcatagtgcccagagtgggaggcaccgagtgcctcactttggtctaccaggagcccccttctttgccaagtctctccaaggattttgccaagactccccaaggattctgctgtttaggggagaacagagggatggtgcccctgcacgctaacaccacccaggccgtgatgccccagaaactgccccatgcttctcaaacacgccacccctcaacaaatacatgggcccactccacagcgagcacgattcacggcgcaagccaccactgtccatggtgcaacacgtccatggcccactcccttgtcctgttccaagaccaggaaacagctgctgcagtcacaagggccactgtgctactgcgacaaggggggctcgtctagagcagctcaggaagggctagccctgtaccccaaaacacgactcaaccaccagcctgtgctgctactgcagagaacaggggacctcggcctggctgggaccttggggaagcagcatctgaatgacctttgctacaaatttggttaaacaggccaggtggttcacgcctgtaatcccagcactttgggaggccgaggtgggcagatcacttgacgtcaggagttcgagaccagtctggccaacatggtgaaacccccatctgtactaaaaatacaaaaattagctgggcgtggcagtgggcacctgtaatcccaactacttgggaggccaaggcaggagaatcacttcaacccaggaagtggaggttgcagtgagctgagattgcaccactgcactccagcctgggcaacagagtgagatcctgtctcaacaacagcaacaaaaaagaatttggttaaacacagacatgaaaaagagacctatagggaccaattaaggtgtgaaaagacaccggatgccattactcatcaaggaaatgcaaactgtaaccatagtgacctagattgatagccataaaaatattttaaaaaataaaaaaaaacataaccacactgagatagctctgtacccatcagagcagctaatctaaaagaagctgacaagagcaagtgttggcgaggacccagaacctctgccgtcgtgggcgggagtggacaaggctcagccactgtggaagccacctggcagttttctaaaaggttaaacaaagggttaaacacacccagcaattccaccccgggtatacacccacaaaaacacacttccgtacaaaaacttacacctgaacatttatagcagaattatttagagaatccaaaaagcggcagtagcccaaatgtccgtcaactggtggagagagaatcaaacaatggaatacagaggaccatgccaagtgaaagaaggctgcacgtcatgccacaggctgtatgactccatttctataaatccccaggtaaggcaaaaccaaagagacagaaagccgaccagcaggtgtccagggctggaggtgggagtggggagtggctgcagccgggcgagggtagagggtcaaaactcacaagatgggacgttttacaggatgttcgctacaccttcccaactgcccttgagctcacaggggccgtctttgttgactcagggcacaggagcaacattctctgacacacacacggcgagttctggaacagacggaggagagtcctgtccgttaaccattttcaatgcacgagtgaaagggaactggcgtaagacacaagaaccacacggagcaaaggaagcaccaaggcagaatggcccagcccaccccactcagggagcccccacaaactcatggcaccagtcctcatgggccccaggagcacacgaccaaggccaggtgggaagggtattctggaggagggagcagcaggggactggagcaggaactcagtgcagcagctgcagagagcaggtgggccccgtctctcgcggtgcaaacctctgcagaggggtcggcccggggctaacacaagcaccctgtctactgtccatgcgaggcctctgcatgtgcagctgtgagccagggatgagggctcagaaaacagtgatgatgctgaggccagttagggtgacaagggacaggaaccagttagggtgcacaacccccccaaggaactgtgccagggcagccccagctgtgcaaggctgagggtgacaggccttgaacacactggccctcccacccaccccgtggctccatgctccctgtgggccacgccatccagtgaggcatttaaccaggttctggtagctgactgtcaggtgggtcaccttcaagactcctttcttgccaagtcgcttatcccccaagggtatggagaacaagacttcatgcctcagaggagaagggctgaggggccacagagccagcctttctctatgatgccaggagggctaacctcaagtgcctgtccccatgagaggtggccgtcatcatggccaggctcccagccactctggctcacactgtatccccaccctccagcaggagaccaggcccttgttaacaacagagcaattcactcctaacatcacgcacgcatgagggtgacagacacaggacgcacccagccattaacagacacgggcactaaggctaactcccgtctaaatcatggccagccctgtgcggaccatcgggcagggacccacctcataagaacgccatgtggtatctataagcagaaccctacagacacgtgaagcagcaggaaaacgagactcctaagccagggggaaaatgagtcggcacaaagacgtgggaagcacagagatgccgactgaacagacaggggctttgggacagctactgtgaacttggaatgctccaagcctaaaggaaaacagctgaagaggaagacgtacgggtatcgtgagagagccacgaggggcttctggagctgagacacggaggatcggaatgaaacggccactaggtggaagtcacagcaggcaccacagaagaaaagggcagcgaacttgaagacaaagccacaggagccacctagatgaatcccacagtaagaagcctacaggaaacgaacaccacctcggtgacctgcggacgacagcaggggatcccacgtgcaagtaactggagtcctgagggcaggcgggggatctgagaaaagagtggccagagattcccaaatgtaacaaatgctataaatccacagacccaagaagccttgtcaacccccagcaggaaaactaccaggtcgtggcgcatcatgagcaaatcagcacagccacaacagtcgccccaagtgccgaggtgccgacactgcacatcaggagccagccccgacactgggagggcatcttcaaagtgctgagggagaaacaccgccagaccacaattccatgcccagtgaaaagagaaagggaaataaagattcgctcaaacaaatgctgagagaatcttctgtcagcatctggcctgcactgtgaggaaggttctagaagttcttcagaaggagggagagtgaccctaaatggacctatggatttgcagaggatgacgcgggcacagtgagcatgcatgaatagaaaaggcttttttcttatgatgtttctgcaaaagatcattcaaggcataaattacggtagtgaggctggggttttgaatgtggggtgctaaatagatggtgatgagaacacaaggactgggtgggggggatgagaaaaaacacagaaagcagctggggtgcagtgccctgacaagccaatcaagggcccaggaggtgagtgtcggctgcagacaggcagagccagctaggtcccttcacggtgggaccagctgtcaccctctgtgctcaccagcctggcctggtggggacgcctgacagcatgtggcccaccacaccctcttctggctgctccctccagagccaacatgcgtggtgtcatggccgaacccttgtcaggggggccaagcgcctcgttacctcatctatgaagcaggacagagggtcaggaacagactgtagcacaggtgatttccctgctgccttagaagctttggggttggcctcaggctgcattaattaaataacggggtaactcagtagcacatgacacctgcagggtactgcccatctcacacccaagaacacccagcaggggagagccatgcctcaggccaccgcctgcccagtctctgtagaccctctgaggggtcatcacccccacaagtcctctcaggccctcgagtggcaaaaatccaactttcattacccagcatgaggtatggaactgggagctcctgagatacaaagtcacccccgctgctgtacttcaggccagggccccaggtgggagctggggagcctggtagggccgccacagctggcctgacacagtcagcaggtcagctgggtcttcaaggccggacaggcaggcactgagctgtgccgaggctggtgctccccagacccaactggacttcagaccctgactcggagaacagacctcaacacagcagggcagtgatgcctgcgccctgcggtcacttggcctgggcgcccactggggctactgaacacagactgggagactcctgtaggcagctccccctcaatgaggacactcctgtaaagacagcaatgcctttgggaaaagggtcgagggtgcagagcctgggaggcagtgagagtcctcaatgctgagacagaggaaagggtgaggaggaacctctccagggccagaatcccctgatcctctcccctccggcaaagagcacttccggggatgaagcaacaggaagtggcttacgaaatccacctccaggccgagtgaccagtttacaggaagtgtggtgggtgaatcttccccagggcacgaggcaatgtctggagccatttctggtcctcaccactgagggcggggacagtccccaccatctggctcgggggaggccagggatgctgctcagcacactgcaggcaacacagaacctcctgccccaaatgtcaagcagtgcaggggctgagaagccctgggctgaccctgccacgggaagcgaccatcagagcagaaagcagaaaaatctatgggaaaaaagacctgctcccttcaacaaatataaaatataaatggaaaagttacgggtgaagaagaacgtatctgattgttggccaggcatggtacctcacacctgtaatcccagcattttgggaggctgaggcaggtggactgcttgaggtcaggagttcaagaccagcctgaccaacatggtgaaactccatctctactaaaaatacaaaaattagccaggcatggtggcatacgcctataatcctagctactcgggagcctgaggcaggagaactgcttgaacccggtaggcggaggttgcagtgagctgagatcaagccactgcactccagcctgcacgacagagtgagactccatctcaaaaaaaaaaaaaaaaaaaaatctaggattgttttaaaaactctccagcaaagacagaaactagggagagggcacagtgaagagatgagacacacagacagatggacggggcccaatctggccaggtcccaggatacctgctaccagcctggggacaatgaggcccaaggcagcaggtgccaaggctgccccaaagacacatgatccttcccaccaccctccagaagcacccactcagcagaagtgcccactctccccaggcagcacgttctccctgctgtctactgggcaaggcctgccaccccacccctgatgcaggaaatgacagaaaggaatgcatctgttccttcttcagaagtccatcttgctgactctcccaagcaccagtgtcagcacacacgtcctgatcttacagagctgggtcaccctgccaagccacggcgtgtggtccagcagagggaaggtgaagtcccgggaagagccctggacggtggcctccccacaacaggccccccctttccagtaaagcacaaatgattgggaaacgctattcaggaatcctccttgagacttcctggcaggactggagcaggacattgaggccacggagagtttagacagtgactgagtggggctgtctccgtgaactacaaaacaaaggaagatctgcccagtgagcttggttggctcagggacgagctagggaacttggacagacacattgtggacctcactggttccagcctagggaaccaggtggccacggtcagggcagagcagagggcaggacccacggcagctcctctgccagcctgggaggacagatggtgtgttcagcaggccaggtgggcctgtaagagcaggaaagggactccaactggctacaagccaagtgtaattcagtggccggcatagcaagtattttttttctttctttctttttggagataagctctcactctgtcacccaggctggagtgcggtggtgtgaacacggctcactgcagcttcgaccttctaggctcaggtgatcctcctgcctcagctcccgagtagctgggaccacaggcacacaccaacacacctggctaatttttctattttctgtagagatagggttttgccatgttgcccaggctggacttgaactcctaggttcaagcaactcgacagactcagcctcccaaagtgccaggattacaggtgtgagccaccgcacccagcccgcagcagatatttctatctgcattcacgaaggtgcatagaaagcttatggaaaagggtttttcagaaatcttgtagacaaaaatatgcagattgcccaaaactgtggcctctacacgctccacgcaccttgcttgcttttcccaggacagcacgctgagcaggccaccttcctttctgcccaatttcctgcatccccacttggagactgaccctccccgcaccctcagcaatcctggatctgtttttttgtccctatggttttgcctttccagaaagtcttatcaatggaatcacataagatgagtttcccgtggtccttgcaacaactgagcataaacttgtggcttaaaacaatggaaactggttctctcacggactgggggccagaagtctgaaatccaagtgttagcaggctccctccttttgggggctctaggggaggacctttcctggcctcttcacctgctgcaggctcaggcactccctggcttgtggctgcatcaccctaatctctgcccactggggtcatgcagccttcaagtcctcttctgtctacattaaatctgtccctctcttacgaggacacttgtgatgacaaacagggaccacccagataatgcagggtaacctccccatctcaagatccttaacctaatctcatctgcaaagtccctttttccacagaaggttacactcacaggttcctggaatctgctgtggccatgattcagccaaccacctactcagcatgacgcctttgagatccatcctgtgtgttgccccgcagtataaatacgccaccttcccgtgcatccatttgctggatgaaggacacaggttgtttccagtctggagaattaatgaatcaagcagctataaatactcatggacaggtttttctgtggacgtgttttcatttcacttggtgaacacccaggagcccgactgctgggttacagagtaggtgtacatttaatttaatatgaaactgccaggctggctcccaaagttgctgtaccattttgtactgccgccggcagcgaatgagagttcctgttgctccccatccacgtcaacatttagtgctgtcagcttatttaaaatgtcagccattctggtaggtgtgtggtgcagtgacagctcgtggaggttcatgtttgggtttccctgctgattaagcatgttgagcatctttttacaggctaatgtgccattcttctagcttcagtggtgaagctgtacaaatctttatcccatttttaaaaattgggtcattttcttactaagttttgaggtttttttttttatatacaagagctttatcagataaattttacattttactcctagtccatggcttgtcttttcattccttttttttttttttttttttttttttttaaacagggtctcgccctgtcacctaggctgaagtgcagtggtgtgatctcagctcactgcaacctccgcctcctgggttgaagcaattctcctgcctctgcctctgcctctgcctctgcctcccaagtagctgggactacaggtgcgtactaccacacccagcttatttttttgtatttttagtcgagacgggttttcaccatgttggccaggctgatctcaaactcctgacctcaagtgatttcggcctcccaaaatgctgggattacaggcgtgagccactgcgcctggactgcctttccattctcttaacagtatctctcaaaatacagaagttcttaattttgatggagtggaatttttcaatttttttcttttatgggtgggtcttgattttgtgtcttagttcctcccatctttttggtttttgttgttgttgttgttgttgttgttgttgttgctgctgttgttttgagacagggcctcactctgttgcccaggcagtgggcagtggcactatcacagctcactgcagccacagtctcctgggctcaagaatcctcccaccttatccccaagcagctgtgccaccatgcccagctacgttgtttttttaactcttttgtagaggtgggggtctccctgtgttgcccaggctggtctcaaactcctgggctcaagcgatcctctcacctcaacttctcaaagtgctgggattataagcgtgagccatcacactcccatcttttttttaaatagctctattttaggaaaatcctccaaactgccattctttaccaactcccctctcccctcccaaactagcagctctgggtaactcctgcctacacccgtggctgccacagcccccagtgaagggtctctcagattcctttgtctgcatgcaccctgggtcatgaccacagatgctccctggatattccccggatgccaccgcccacctggcagttgcagtgcagggtttttggacactatccaggtccttcttccagaaggcgctcagcaggtgagcagaaagtggcctgtgtctcatgggaagcccctcagatgtctgtccattcctgcgtcatagctgggggtgggggagctgcttggactccctgtccgtagaaatcacagccaaatcacacgcaaggactcgtggtaccacagacggccagcctccatcactaacccactctcatcctaaactgcatgggatcgggttccggttgttacaactgaggaaaatgaggtactgagagaggacagggctgcccgaggtcacagcagacctcatcccaacctcacaggaaaactgagccctggggtccccatgaagatttcacaacttatccaacctcacatgatcccagggtagcaggatatgacaaacatttactacacaattcttcaagttacagtgcttctatgtccctgagccctgcttcatcagacagacagaagtctccctccaagggagggacaagcaccctgcctgccctgcccaccctgcctgcacctccatgggtcaatctccaggcatggcccaggcctgcttccaggacagtgcatctcagagccatgcaacccatgcctggcacaagccctcctgccaacaccttaactttgcctttcccccttattattccaccttttgcatctgcctttcttcaaacagggaaagacgctgtcgtatgtgggcacctgctgcacaagtacactccatgggcacctgggccacagtgtcaggcccctctgtcccctctagcgcactctgcagtgtctgaaacagagcaaatctgcaagtgccagtgtgatgggcacagaatcccgtttggcagccagacgctgtggtggctcacgcctgtaatcccagcactttgggaagccgaggtgggtggatcacttgaagtcaagagttcgagaccagcctggccaacgtggtgaaacccccatctctactaaaaacacaaactttggccaggcgtggtggcaggtgcctgaaattccagctacccgggaggctgaggcaagaaaatcgcttgaacctgggagggggaggttgcagtgagccaagatcataccactgcactccagcctgggcaacagagtgagactcagtctcaagaaagaaaaataaaaaatttaaaaattagccaggtgtggtaatgcgcacctgcagtcccagctactcaggtgctgaggcagaaggatcacctaagcacaggcgatcgaggctgcagtgagccatggttccaccactgcactccggcaggggtgacagagagagatactgtctttagaacaaaacaaaacaaaacataacaaaaccggcaaggaagcacatgaggcttcacaaccaatgctcttttgcctccacctgtgctcctcaagaggagtgcaagagtttggtggggttttgtttttctttttaatcattcactaaaactcaccaacaacaggtactggacctaggaattttgaacggaaggccttcgagaaactgccctctcaccaaacctgccttctgcccatggtctgcggtgccagataacaactgctttcccccagacaacagtgaccatgatctgatcacatctgacaatggaagaagctaagggactgacctaggtcactggggtcctccagggcacagcatgggcctctcctagccctgggttcctgacgtttctgaggtgaatgagaacgctctagggcctgacatgggccatcccctcatcagagcccaggccaggcctctgtgggggttgggtccctgagaatgcagctctgccttgccactgtgcttcctgctcaggcagctaggaggtcccaaaccccattcacctccatgggactatttggagcccagcagaagcggcccatgggctctcctctccccaggaggcccctccaggcctccatctcaactcccctgcagacaaggccatgtgtgtgccttcgacctgtcagtctgtagggccacctcacttttgggccttccaagctcaactgctattagagcgcctcctctctgccacactcccaaggccacccgtcctcagcctcaccacagagcagactggccccttctgccgagccccagtgcacccaagctttccagctgcctccacctctcccctgaaaacagctaacactccactatgggagcccatctcctcccagggccagggagaccagggagaccagggagaccaggtctggcccccaactctaaggctcatcttagaggcgagattcaggcccagcccagggtgccccatgaggcctggtggttggaggcagagggtatcccttgcccaaattcgtgccacattcacagtcactgggaaagctacggggatgggccgggcgcggtggctcacacctgtaatcccagcactttgagagccaagacgagcggatcacgaggtcaggagattgagaccatcctggttaacacggtgaaaccccatctctactaaaaatacaaaaaattagccgggcgtggtagcacacgcctatagtcccagctatttgggaggctgaggcaggagaattgcttgaacccaggaggcagaggtggcagtgagccaagatcacaccactgcactccagcctgggcgacagagcgagactctgtctcaaaaaaaaaaaaaagaaagcaagctacggggatgaaaacagttaaggcactctcctggatgcatcacgaagcccctcagccactgtttctccctgagagcacagccaccccctgctgaccttggcaggaagcaacaagccccacagcacaaacacccccaggctgccctgcagagggggctccacctcgggtgggagccctgcaacctgggaaggaatctggggaggggcttctgtgtgaagcttagctcagggccccaagggcggtcagtgtcaggcactggctcaacaggggcaggaagagagaggctgctgagcacctcgtcctcaggccactctgccccgtttctaacagtctatgtacaacagacccacccaagatgtactctgtgacccagagtgggggtgcggtcctgggagtgtccactgtggatgtgacccaggtcagaaggagatggcagcttgccaagctaccaaggcacacactcaggacccaggaggaccgtccttcctcctccggtggtcggccacactcaccaaggctgcccctgaggccctcagagacccaggcggttctgagaagggagcctgtctctgaagcagaaaccacgccctttcacggggcccctgtgtcacgtcagccgcctggatgattcacagctccgcaccggactcggctcttaccgcctcatctcattgtctgctcactgcaacctctgcaaagcacccaaacccctgtcccagaagataggcaaagatcacagaaaaataagaggatgccaagagaatctggcacccttcaaggcatgacccgtggtccccagccagtactcactgcaagggtgctcttaggtccccttcccagtttgaacctgcaacctgggagctgccacatctggacctcagggatgtgaccttgccagccacaaaggttggcatcgggtcctgcctgccacctcacccacatgcgcctctgcagccaaccaaagccttccaagatgctggcctccaccgtcagctacatgccatgctgacacctccgatgcttccaccaccacgcagtgggtaaatcctaatcactcaggaacacaaagaaggccctgtgcgtgtagaccctgctgctcagaccccgctaccccccaccaggagaccccctgagaaaggagtaactgcttctgagccattgcccatatgggctggcattccccataaaaacccattgagggctccagaggcttctgggaacatctggacaatccaaccaccccagagagtagggtcacccctcaaatgggcaggcccagtgaggacagagcaagcgttacatatgtgtcctgaggtgggcatcaaggaggtgccacgagagccaggccccagtcttccttcgtgcttgaggagcagctgggtttgggggacagttgccctcagcatggccataaaccaccttgagtgcttaggatgcgcacagatccctgaatgtgctgtctcaggaaaatcctccaccttgctgggtctgacagaggcagctgcatgaaaccagcccacttttaactttagagacagaacctgatgtggccacggccaggctgcactagcccctcagggaggccccaggccagataagcactgcctgcatcttccactgaggaacatctctgggacgaggacccgtgcagctgcctgatgctcaggttcatcaccaacagcaccaagttgttcctctggagagaatgaatcagtcccttcagatcctcatcctcctgaaagttgagcacatggcttctaacaggcccaggtgcttaccttcggaacaacgggatcttctattacccagaaaaacaaagtagagccttcccggtacaatctgtactttcagaatccgaacactcaggagctgtgctcagaacctggctggcagggcctgctctgccccatccagctgtggtcccagccaccagactccaacctaccctgacaggagccctgtgcctgccggccccacctcactctggccacaaccaggctggcaagtgtccaccgtggtctctgcccagtaataacctcagcagtgtggtatggtgtggacatcctcacctggtgggcccatcctgagaaacatgcctgaaggcacccggcaggtgagcagggagagaggtaggtcccagcccgcctctccacctgggtcttatctcacaaaaggatcggccctgttattgggttaggtcgtgggtaagcgtacaccaagatccgccaactgacttcttcccagaaagatgcccgtccttcagagcaaacggcctgacaagaaatgtcaccaaactggactcctccccaccagcagcatagaacccagagcacagctcccacagagccaaaaggagaccacacagcaggaagcacgtggcactgccaagctggataggagctgcagaggcagcctgtgaccagcagggcatgtgctggccagggctggcccagggcaagtccccaaacctcagagtacccaggaggccctggggctcaggatccagggctctagggaggggctgcatgctcccagcatccacggggcgggggctagaacagaacatgctctgccaggtgctcagcgcccacacaccctcaaaagtctgatcgcagggaccttctatggaccgggctgtgcatcttgagggccaacttcaagcaaaggaaagcctgatcacagggaccttctatggacagggctgcgcatcttgggggccaactttaagcaaaggaggagactgaggctcagggaagccaggtgccttgcttaaggccaccagctcagtaagtggcagggcttgagctgaaacacaggactctcccaaaatgacgaggcaatggcaccctgctatgtcagaatgtgtcttttctccttccaaactgacaaactgactcttcacaggcgcaggtcatgcgtcctggaccggctgaccagagtcctgaactgaagctgtgcaggcgcgggtccctgcatctgcagaccgacttccgtcatcccacctgcagggggtgtggaggagccttgcctgacagccggagggagctggagtctgaaatctcagctgctctttttacagaacgttttgtcacctgccttcaaataaaagcgcccaatttcggctcaaggtgacatggattgggtatttgcctagcagctgacacacaccagaaagcaggagacagcaggagctctgccaagtgtgctgtggatctaggtcagaacatggtgcaggtgtgagcgagggggcgtcctcccaggaacgctagcacaattccagaagtttcaagagaatgctgaagttcagccaggtcagacaaccacttgaccgcggacagatttagagaaagtcatgcaggcctgggcagacctcgggctggccgccccgggtgctcccatccccctcatgttagcccctggttcccccaaccaccactcactcctgctgggacgtcaagagccccaggttcttggctgctgccatccaagacctgagcctctcccagccagctctggcaccttctctagtttcctcagaggggaatcttacccaagtatctattggatcactccctgcacaccccagctgcctgataaggccggcaggcttagccctgcagcccccagcagcccacgctggccccttcatggtactcacactcagtgctgtgtgacccctgtgcctactgcagtctagatcctcctgggatccacctggccaacacctcccccaaggcgtcatcagagaggctttccaactgtgagggctcactggggccccggcctctggctgtgagcatctcactgattggggtgcgaggttggtctcttcccacctaaaggggagttccaggaggagcagtccctcctgtttctgctgacccctggggctgatggcctagcactaggacaacagaataagggcccagacgcgcactgagcagagatatggagctggccctgaccacgctgtggagcccgtgctggtccctcaagcctccagccacctgcacgcggggccagccaggccaggtgagacacagccttgcttacacgccagctgcgtctgagagcagagaaccctgctgtcgccttctctcctggacgcaatctaaaacaatctcaacttacaaaaaacctgcaagaacagtacaaagaacagccatattctgtgacgtttctgccacctgcccctcccccccacccacgcctattatccacatacttagatgtagcaacacacttgcttcttgaaccatttgagggccggctggagactttgccacactgtgcccctaaacgcagcatgtttcctgagagtaaaaatactcttctgggccgacacagcagggaccagcttcacatttattattaatatgacacttcaagccaccgtctgtctcccaggtcattgcctgacttggtggtgacctcacattgtcctccccgcagcgggagcccatgggcagtggcacactgcactcagctgccctcatcagctgcctctaatctgcaagtttcttggccattcttcaacattcaatgtttttgggtaacatagacccctcctcactttcttcatcagagtgtgctggattttgggtctgcttggtgtctcctgagaccaaatgcatggtatcttcccggccaagagccacacagtgaccacggccctcggaaggcatcccaccctcatcagccgtgagctctgacggcccagacagcgctgccccgtgccacaaccctcctcccctcaaatctcccagcaggtacccactgcacacccgcagccccaggtgtagtgcctgccatctgcagtttggctatggtggccataaaaccctggttctatctccactggcctggggaggagccccctctctccccggtctcacacatgctcaccaccggcagcaggtgacattctcacacatgctcaccaccagcagcaggatggctagcatcacacatcaatgtggttaggctacagtatccagctgtttggccaaacaacagtctagatgttgccatgaaggtatttttcagatgagattaacatttaaatcagtagactgttttgttttttcctttgagacagggtcttgctctgtcgcccagtctggagtgcagtggtgtgatcacagctcgctgcagccttgacctccctggctcaagcaatcctcccacctcagcctcccaagtagctgggactacaggtgctcaccaccacacctggctaatttttttttttttttttttttttttttttttttttttttttttagtagagatggagtcttactgtgttgcccaggctggtcttgaactcctgggctttagcaatccttttgcctcagccccataaaatgctgggattacaggtgtgagtcactctgccaggccaaaatcagtagactttgagtaaagcagatcaccctccaacgtatgggtgggcctcgtccaatcagtcgaaggcctggagggcctctggcagaaggactctaggcttgagctgcaacatccactgtaacctaggtctccagcctgccgtcctgccctgcagattttgaccttgtccccccaaccccataaatgcttaagccgattcattaaaataaagatggaccaggcacaggggctcatgcctataatcccagcactttgggaagccaaagcaggaggatcgtttgagcccaggagttggagaccagcctgggcaacatagtgagaccctgtctctacaaaaaaaaacaaaagattagctgggtgtgatggcacacacctgtggtcccagctatgcaggagactgaggcaggaggattgcttgagcctgggaggttgagattgcagtacagcctgggtgaaagtgtgagacccagtctaaaaaataaataaaataaagatgactttatatttacctacctacctctcttctctctaaatatacatatacacacactccctttagattctgttttgagagccctgaccaatacagactcacaggctaccttttgcaaatggcctggagcacgacactgcccttaaagtcttcatgttcagattgtcccaggctggctttttgtactggctcctggctcttccccaacctcctctgagcccccactgagaccatgacactaggagaggatccaggctccacccggcctgttctggccacaccatggggttacctacctctgtgaggaggccacattcggtgacctggaagcttcctcatccgtcatggtgacgctgcttacagaggtctcctgcacgggacagctccccactgccctatgtgcaaggacggccattcctgcatggctcagcctaggggtgtccttgaatttgagtgggatgaaggaacatatctgtttttcataaactaaaacgtagcatttccttccatttgaaacataagcaataagctacagtggtatcagcactatctgtgcctctgacgtgctgttagtgcatccaacgatggctgtgctgctatctggaaatgccacttcagctcaccactaattatggcagtgagactcgctactcaatctcattattaatgtgttaaaagagtcaatctgttactgggtcacatatttcttttgagcgactgataactctcctgacacacaagtgtgccctctcctcctctctgccaaaggcatccccagacctctcaactaccaaggaggggaggtgacagaagctgaagctggcagagggcagctcaagtcagaaagcagggctggagtccagcagccaggcccaggcccagctccactgccctctaagcggcatggccttgggtggatgagtgagcctctctgagcctcagttttctcttctggaaaaatggggccgtgaagtcccactggccaggctgcgatgacaccaggaaaagctaggacaagttcattcccccactcctctcatgattcctcccctccaaatgaaaagccatttcatttgcttcccactctccaaatgaaaaaccatgaccttgtcacctgctgctcctaatccccaggtggcttctaaagccaacagtgacaagcagagggaagagcaggctgccttcatcttcccctccgagaccagaccacaagggtgaccgagaaggaaagatggagcttatcccatggagacaagccacttctacaagtccagggatttgtctgagataataaaggaatggggctggggatcccatcagggcaattcagaaaccctggtgaaaagaagggccgctgtcaccacagtggcccaccaggccagggggaagctgtgcccacaccttccagaaaagatgggctctgtgctgcggccctgaggggcttgccctgggccctgggcagcataacaatgcatctggcccctctgaagccagggctgtgctgtcactgctggccagggcagggagggctggctccccaaatgcagggcctggtgctccaacttgggtggaaaacagagaccctgaactgggagtgagctgccgcacttgggaggagagagtgacatgaacatggtgtactctcaacctctgacccataccggcaacccgacaggcaaggcacgcagaacgactgcagccagacggccccacactccacagacgcctggaagggaggcgtgtgtccagctgtctccacctggactcccaaggctcagttggccctgcctcaggccctgccccagaagtgcccagctccctaacaggggctagggaagaaagtggcctacaggcccaccagcaaccccatccctttctcatggcccgggaaaggcctgctgggtcactgaccactcctcatagctctttgctctcttgtctgcacacacagatgtccaccagtggggacaatcctgaagacaattgaaaggtgatctaacctacgagggcacagtaaagtgagttcatggcctcttgtcccaagcaggtagacagaaacaacaatcagtaccagaaatccatccaaggacaggcaggtccacacagaccagaggcccccaagatatctccaggtctttctcccttattccaacctcactcctcctctccactgcccagagtgaatcgccacaaaaaaaagtttctgtttggagactgaggtaggaggatcgtttgagcccaggagttcaaggttatagtgagctgtgatcaagctactccactccagcctaggcaacagagcaagaccctgccacgaaaaaaattttaaaaagaggggaggggaaggggaggggaagggaaggggagggtcaaagagagagagagaaaaaggagagatttggatgtagacggtgccagccatgacagcatcagctcccagcccacgtaggaaggaaaggaagaaagttagtttcttttttgtttttttgtttttttttttgagacggagtcttgctctgtcacccagatgggaatgcagtggcgcgatctctgctcactgcagcctcctcctcccaggttcaagcaattctgtcacagcctcccaagtagctgggattacggatgcctgccaccacacctgactaatttttgtacttttagtagagacagggttttgccgtgttggccaggctggtctcgataatctgacctcaagtgatccgcccaccttggcctcccaaagtgctgggattgcaggcatatgagccaccgcaccaggccagaagttaatttctgattcccactctctgccctcccctccccctccccacctgtgctgatgacagaccccactgtccagccttctgggctctgaccaggtggggcatcttcctgtctctgccttcagagcttgggaggccccacccgtacctgagctggagcctcaccttcctccacttccctagccgggtggcatctggacaactctaccctgtacctctaggcagatgtgatctcagaaccaccatgtgcccaggatttgagagttgaaaaagacagcaaggcagaagtccagggcatatggctggcgctaactcaatcaaggtgtgggctataacatgttaggccctgggaactcatcagccaaggagacagatgtggccctgcccattcagagcccctgggcacaaatgttggagtagacaaaaactagagtgacacagggacccctggcagggctgttctaactgccaagggttagggaccactgagccgagagccgagagcagaagtgcaggaggcgagctgaccccaggagactgcaggccttgtggggtggtctgtggaggagtggggagggtcagtgtctggcatgacaaggctcgggagcatctgggggagggcctggccccacgtgcacatcaccagcaccctgggctgctggggtgtggagaggaactggcaacagcagcaaaaagcccaagcaggagttggtgggccccaccattcccacccactcactcgcatccccatcagggagggcacaacacccacccagctgccctgagtagcacagcttgcaacttccttgcttcaggcgtcaggaggaccctaaaggcttcttggaagcagcgccccgcatgagggtgcccagctcccactgcagctgaaggaggagggccgagagcctgcggagacagggctggtaggcagagtgacaggcggcagtggctgccccactgaggagaagaggaggagccacaagccctggctgagtgagcagaagccagtccccctgccccctgtacgagtggccactctggggcagtatgcactgcagtggagggatggggaggcaggcaggtcccacgcgcctcagcttcccaatactgaccaagacctgggctgtaggggagacttggacatggacagcgccagccagggcaggcccactgaggcctcttctgatcttaccttggactatgaggcttagggtggagggctgaggagcaggctcccgccacatgggcctgaaaggggctagcctccgtgagcccctaccctacctgctccacacagtgggcgtttggaggtgatgtgggaggtttatatggggactgcagagggcgtggagatgcaggcacagtgccaccgacactccactcggtccccacaacctcccggacagatggggttactccctccttatggatggggaaactgaggctcaggtgaggccatggctgcgccccacaaaagcacctttcagtactactgggccaaacattagaacttgataccagagctgtgacggccatgcctgagtgtgtgggcgtggttgtgaaaagagccacccgtgagccccaagaggtggccgggccactgcctcatccagaaaactcccctgcatgcaggaagagctcaagggctgctgtgcagagacactgggtgaggaaagagctcaaaatctccctgagggatgactcaggagacagagacctgaccagactcagcctcacactgcacccagagtgcttcctctacttcctgtggtaacagagcctgtcttcctgggctcgagaataaataaaaccaggtcaagtgcaggtaacaacttttttttttttttaccttattagaaacatatagtttggcaggagctacagagatcatgggttggaggcgtggagtagggttggggtttggcacaagtccaggcacaggcccttccccagtgtcccctgccagcaggtggggccagctccaggctgctgctgtccactcaggtggtgcggactgggggaggtccttgccaaggccaggcgggtagcacaggaacctgtggctgtggcccgtcataccaagtcttccactatgggcaaacatcacttcaataatataaaaaatccagaaggaaaagtctagtctgaaatgacaatgagataccaccacatgcttattagaatgcccaaaactcagaacagacagcaccaagtgctggtgaggacatggggcaacaggaacctcattcactgccggtggacatgcaaaatggtgcggcctcaacagattcctgaaaaactaaactaacatactctcaccatccaatgcaataattgcacgccttggtatttgcccagaggcactggaaacgtgcgtccacatgaaaaatactaattacagcagctttatttgtcattgcctaaactcagaagcaaacaagatgtccttcagtagatgaatggataaataaaccatgtcacatccagacaacaggatataacaagaaatgagctaggaaaccatgcaaagacatgaaggggccttaaaagcatacgactaaatcagccagtctagaaaggctgcacactgcacagttccaactacagaacacgctggagaaaaacaaaactatggagacagtaagagcatcggtggatgccagcgggcagaggggaggaaggggatgagtaggtagagcttggaggatttttggggcagtgacatgactgtgtggcactaccatggtggacatgtcattatacatttgtctaaacccacagaatgtacagcaccaagagtgtgtcccagtggaaactcagggctccagatgataaagacgtcaggctgggtgtggtggctcacacctgtaatcccagcactttaggaggcctgggtgggaagatcacttgagcccagagtttcagaccagcctgagcaacacagcaagactgtctaaaaaaattttttttaaattagctgggcatggtggcatacacctgtggtcccagctacccgggaggctggggtgggaggatcacctaagcctaggagatcaaggctgcagtgagctatggttatgctactgactccagcctaggcaaaagagtgagatctcatctcaaaaaaaaaaaaaaaaaaaaaaaaagatgtcagccagatgtgatggctcatgcctgtaattccagcactttgggaggctgaggagagcagatcgcctgaggtcgggagttcgagaccagcctgaccaacttggagaaaccctgtctctactaaaaatacaaaattagccgggtgtggtggctcatgcctgtaatcccagccactagggatgctgaggcaggagaatcacttgaacccaggaggtggaggttggatgagccgagattgcaccattgcactccatcctgggcaacaagagcgaaacttggtctcaaaaaaaaaaaaatgtcagtgcaggctcatccattggaaacaaatgtgccactctgtggggtggatgggacactgagaatgggggaggctgcaggtgcggggaggcggggagaagtatataggaactctaccttccactcaactttgctcagtattggccagagccaacccggatcactaaaactatttctgacctaaaattagatttcgagaagggcttcatagtagcaggacctgacgggaccctagggcagtcgcctcagctagaagacaaccaggaggtctattcagttaggaagggaaaacaaaactgtctttctgatgccaggcagctgcactcaacggtgtgagactgcacagtaccatccaaactcctggatttctatgattctgggaaaacagaatcggcagtgtcacgaccaggacagaaggtccggtttagcttcagggaccctgtgagaccctccccaatgaccagcagctgggctggcctctcaggacattgctgcccccggatgggtagacaggctgggttaagaacacagaaagctgggtgtggtggctcatgcctgtggcacttgggaagccaaggcgggaggatcgcttgagctcaggagttcgagaccagcctggacaacatggtgaaaccctgtctctactaaaaatacaaaaattagccaggtgtggtggcaggcgcctatagtcccagttacttgggaggctgaggcaggagaatcgcttgaaaccaggaggcagaggttgcagtgagtcgagatcacaccactgcactccagcctgggcaacagagcgagactccttctccaaaaaacaacaacaacaacaaaaacccacacaaatgtgtgcactagggacaaagctaaaggctggctccctcctgcacgccaccctaggccactcattctcaagcccaggatgccaggagggaagcctggcctcagccttaaagctgaggcagctcttgaggcagtgtcaacgacctctcctagctggagatcccagcagcacacttcactcatcccagcagggatgggagggctcaacaggaatgacacaagggccaccagcagctgctgggaagtgaaagcaaaacttctatcttggggcccaagaactgagatcagaagattcacttccaacttatgatctgccatttaaaagctgtgtgacctcagtaagacacttaacctctctgggctttgtcacacagggtgatgatctaacttgcaaggctgctgaaacaacatattaacagcacaaactggaccctaacatacccgtgacctccagcatctgcctgtaagcttctaaatgctggaaataaagcaacattctttaaaacaaaacaaaacacaaatacaaatcctgccacgaggaagggggcaaggtctcgggcccctgtagacttcccagggttggggagatggtccctcagcccaccgtgtggctgtgaatgatggacttgacatctgaactcatcagttttctcatctgtaaaatgggaataaccccatcctccctttcaggggccacagtcagggcatgagtagccacagccacaccacctcacggcatctgctcccgagacagaggaacagaggggcacaggggacaagggctgggagaaaggacactggggggctctctgggtctctaggagaacccaccagggatggctgatgggacaggccccacaaatggaggaagagcggggccgagggagccatctgaccacagaacatgctcagtgacctttctcaaaactgcatcaatgaccccaaataatatttagcaaggtgagagcaaacccattaagtgcttaagcaaaacacgaggccaggtgtggtggctcacgcctgtaatcccaacactttgggaagccgaggcgagcagatcacttgaggccaggagtttgagaccagcctggccaacatggcaaaatgccatctctactaaaaatacaaaaattatctgggcatggtggcgggtgcctgtaaccccagctactcagggggctgaggcaggagaattgcttgaacctgggaggcggaggttgcagtgagctgagatcgtgccattgcactccagcctgggtgacagagcaagactccgtctcaaaaaaaaaaaaaaaaaaagtgagaccaccagccacgttcctgttcccgccttcctcactcctgagacaggtgtgaccatgaggcttcctgtgcatatcgtgggtttgtaaatgaaccccactgggctgtaccaagtgcccttcaagaggtccacttctcctaccaccttcacagccgctccatcaactggctgcttgtgacatttgaaatcttacacacagaatccagttttctccaggcaggacctggcacagctttgttcccagagagtccattctcacaaaaggagagacgggaactgggaggttccctcaaggaagcagctgtgtgttggggccgatggagaggtcgactggtcccctgggaaggtcggcataacactggtgccctgcaacctcttggcgagctctccctgtgccaggccccgggcagcatggcagagggtggtcttgggctggaacataccattgtgcaaaatagctctgggaactgtcaggggccatacaaagctcactatttttcaactcaaaaacactgctttagctttttaatacgtcactgaggtacactgaagcatacccaagactctcaaaaacagcctaatacagtttgagtgcttcaaaaaataccagccaatttgcacacagatcacactcaggaaagtgaacacatggcggctgctcgccaaattcaactccacagagttgactctgtgactccacagagcagaacctgcagggaagcaggccaacctccaaccaccgaacttgggccaaaactcacagcaggagaggcaatgccgtcccatcccaagcatgtgggcgcacacccaggagaagaacgagcgggccacgacactgttctcgccagctatgcctgtgggcagcaagcagcacacctccaggggccacgtagacaacctgtgacacagtgaaccccactccacgccaaaccacccaatgggaaacagtggtgagcacagccatggaccacagagagtaacgcaagtgggcaaaacacatgagaagccaccaagcagacccggatgagagcaatactgtgtgtgcccagcaccaacaccaaattaagaggaatcaaaaaccctgctgagcgagagaacgtgggaaagggcctgggatgggcccactgttggcgaggaggggcccacgcctcaacaatgaggcggaccctccaacgtgcctcacacttcaaggcagctcttccaggccagccggggccttggagtgaggggccactggcagaagggagcaagacactggtccacggcacagccagctcagagccaggcggatgagacgggggccaagccaggggccggctactcacgagtgcacacgaggacagccaggattcactaggacaggatctgcccaatcccaggcacttcccactggtccatctgacacacctgggggcccaagaggtgatggcatcacataaaagcaaaagaaacttgaaaccaccaatccaggcaaattcggactctcccacaaatggtccatccttggggagcatctcccccacatcctcaacctccagctacgtgtctgcgggtgggcaggaaggaggggaggcagcatgggcaccagtgaccaggacagccctttccaaaagaaggccctgaacacagtcaagaggaagaggaagaaacactggggcctggcgggcaggtcctggggcctcatgagggtggtttggggtcagaagacacacgatcaggaaccaggcgtcacccccagaggctgctggagtgcgtcccacagaggcatgagcagcacctggcatggggacaaggagcttacagcaagtgggaggtgctctggtgctctacgctaagctgcctggtgccccacagctccacggggcaggagcacccgggaggctcctaccaccacagccagatagcccattgaggacgcacacccccagtccagcacccagaggtgaatgaaggattccaggacagcaagggagacacatgaccaccctagggtggaccatggaacagctgtgggtacacaaaggctccctggagccatcatccgtggagagcaccaactacgtcttctgagttgtgggcaggccaggaggggagggaggtgtcccaggtgagggccaggcctgtggtgactgtgcctcgcagtgggcagggctgccagaacccagcagtgagctcaccttagtcaattctgccagcgggcacccccaccaccagggaaatcctgcaaccagccgcatcaggagcagacgtttataactaaaagatcaaatatccccaaccacaaaagtcccagtaatccacacatgggacttcccaaaatcccatctctgagagatgacaactgaagaagccgaggaggaagagacggtgtttaaatgagagagagggcccaatgacaacggacaccagacacctgccacttgtcatgttgcagatgccaggaggaggagtgggaacacggggtggcagcatgggttagtgttctgcaaagaaacccaatgaccttcctgtttttgcttctgagacaacttagggaaggagttttgggccatcaatgcggaatccaaaagcccctgtcttgggaaaccacggggccacctggccgggtgtgccaatgcccagcagagcttcggttattaacagggcaggccagcgctccaggcaggcagctcggcacttccagtggctgcacacccaccacacacaggcacagggctgggaggcactgctcggctccctgggccctgccagagtggctccctatcacttgcttattttataaagtggcactttacagctggtttaatgtggtaaaacaggaacctggcttaaaaagaaaagggaactcgcactgtgccaggctggcacccagcgcagggacatccctgtaagcatccgtggtctggagagtgtccagtggcaccgcccgcccagcagtcagggccgcgggtatctttatggcatctgggagggagcacccccaccctggggtgataagtgggatgaaaagaaggtgacagagtttttctgtcttatttctggaaaaggcaactggcaaagctggagaacagcaagggagtgaagcagacccataggagcgagggagccccagcaagtggggggcacgtctggccaggctctgaggaactgagctgcccgtactgggaatcccaggcaggatgtgggctcttggaggtgatggaacagacagaacaggctattgcaggacacacgttcctcctcacccggccccaccacatgttcatctagtaacagttcaccaagtgagctgatgtggccccagacacccagagctcagggtacgtgcagagccacggctgctgagcactcaggggctgtgaggagatgtctgagcagtggtgggaagggacgggacctgttactctggccacctggagccagcgggagtggagaatgggctgttcccaagcacccgcctagggctcagaaacaccacccttccttgggtcctgccgagcttccctcctcagggagccttccctgctgcaggctggatgagggcccacgggactgtcactcatcactcccgttcagaatgcacctggctaactggagtcacacgtgggggcctggctgctgcctggccaaggttaaggacacacactctggccagacgctaggtctgaccccactcctatccatgtggacaacccgctcactcacatccccccgcctgatccaaggggctcactgaagcactgactcctcggcatccagggaggcctcgcctggtggctgcagcgtgcagaggatctgcgggctgtcacggcggatgcaggggtcaactgtgctggcacctctgctaagcatgcatcacttcattttggcctcctcagccacttgtgccaacaggccagggacggcacagagaggctggaggggtgaggctgaggaggaggggaggtgggcaaagggcatctgtcagccatctacctaagggtgtgctcactgacgcacagaggccactcctgctctgtttttccaaagcaatctgtgactctcgggattacccacatctcaagtcacatcctgattgaaatccatgacgcgtggcttgctttgctaaatttcccctacattttctacagagctcagcattcttcaactcccatctgaaattgccatgtacatctcatccctgtcacgttcatctctgcctgggaggaaggggaagtggctacagactccagaacctgcagcctgggtccggtcatcagagcagtgatgctctctgtcattggtcagcagaggttaggcccacctgtcaggcctcagaagagcctggcaccgcccacagggtggatcaacgggttaataagtcacagcagaaaacctgaggctcgactttaaataaacagaactctcccagctgcatccctgccaaggcccgagagtgacactggcacatgagctatatctccccccaccaacacaccccatgggctgtcatgagaaacactgcatataccagaacccatttactctgggacactctccacggagccctgccaccacctgtccagtggacagggcctgagggacacaaagcccccacagccctgagcacccgaggagccacctggcctggggatgtgtgatgcctgcgcacaggaggctctcagcccacagctccagcagaggaaaaaactcttgccttgtggagacaacccaggctttgactattctgggctgccagggctgtgggagcagcaggtcaaggttcaggacatctcaccctcctgccatcatggccaaacctcaggcgactgagaacgatgggcaacttctgtgtgccagagggcagtgacataccaggacatcaggggaacacaagccactgtcccgtagcccccactcctctcccatcctctcctcccctcccctctcctctgtggtgtgctttcttctgcatctgccacagctcacccaacagcaaatgcaatcccaactagttaggctcttgttaggactgaagatagcttttgctattcttctctactcaattcttcatcctaaggatgctgtggccagtcacaccctcccacgggcaagggcacccggcaataagccccagctactgccattactcatcccacttcccaggcaggcaggaaggcaggtgtgcagagcactgggcagggccatagtacctgtgccacacacacacatgctcttcacctcatccagagtttcctaggttttggtgcttcaacagccctcagtaacgcaggctccttactatgagatagcctgggagagagctggggtttctgtgatgggaaagggctaagccgggaaaggaaacagtgtgtgactggcgccttgcaagccacctaaggcaccaggcacacacaggggaggggagaagaggacgggagaggagtgggggccacgggatgcggcttgtgttcccctgatgtcctgggacacagctccctgaaccccaaaacaccccacggacaggaaagcaaagtaaggagaggtgaatgtgagttgcaggaggggctgcaggcactgacctgacctcccacccacaggatgaccccacacagcagagggagaaactgaggcccagagggtggcaccactgtacagtcaggtacccccaccctgtgtcctgctctgtactacacagaccacccagcacacatgtggccaataccagtgaggcaaaggtggcagcctgggccccccatgctggccctcagccatccctgggacaacagtctagacacccagaagctctgcacctaggcccactgacccagcctccctccaagccctgggtgcccatgtgtgcccaggctgctgcccctggcactcaggccatgccacacgcagcagctgggtctgaagcctggcttggaaccagccccccacagtcaacatggagacagccctgctggcaccgccccaggcctgggccctgtctcccgcaccctccagcgacctgcctgggccaccctcaaggtgcgcctgctcctaagccgcctcccacagtggagggacacccgggctgcttcagagcagactgtggcaagttaccctctcccccagggggaaagggatccaaagctcctgtgcctctggggtgcagcatcagcccagacttctgctcggctgggtgccatggctcacgcctgtaagcccagcacattgggaggccaaggcaggaagttcgtttgaggtcaggggtttgagaccaggctgagcaacacagggagactctgtctccatataaataaaaaattagccaggtgtggtgccacgcacttgtagtcccagctatttgggaggctgaggtaggaggatcacttgagcccgggagccaaggctgcagtgagctatgatcacaccactgcaccccagcctggatgacagagcaagacctcgtctgaaaaaacaaaagcagacttccgttcaacagcatgtgaacctcaccttgcacacctaggagttcgttaccctcctcagctcagagattagagggaactctccccacagagatgctatgatcagagggccagggaccctgtctcattgatcctacgctctacgccagacatcgcctcagaatccttctcaacacggctccacttcctatctacaaggagctggcctacaagatggaagcgattcctacattatggggtcatgtggctccaggcacatggccctcgaccagtgggagcctgtgcacaggtaagagagccagggcagcctggagatgagctggacacaggctgccagcactggctgtcccctcccacttgccaaatccagtgtgagctgagcacatttcactggaacaagcaggcgtctgagagcatccaactccaaaaatagtgccaccaggagaggaaggaacacgctcttctagctgcacccgctccctgccctcagatacctccctgcacagtctgtgcctggcctgtggcagttcaagggtcacacccaactctgaaaagggagagataacatccccagataagaagagtgaaaacaggccaagtctgctgccagagcctggccacagacccacagccccttggcagagaactgctcaggaagtcctcctctgagtctttcaagccactggtatctaacaaagaatctaatctgcacacggcacttgccccgagctaagaaagttctggaagggtctcctaggtctccccagcccaaggtgagcttgcttctgtggagggagatgcctgcctgcccatgtccaccaccactgcacaccaagccagtctgaagccaccatgatctggctgttgctggtttatggtgcacctccccgctgcgaagaagtgggccatgtgagcgcaggggcttcatccctcctgcttcttactggagaaacactcctggaggcagccgaaccctcactgggtgcaatccctctgtgtaggagattgcactgtgtaggttgtgccccgccgaacaaccacgcagctgaggctcagctcagagactgcattcagagcccaactagaatcagacacaggttctgcgggccccactacccatctggaggcagacgcctgacccccagctccatccccagagatgaggatgcagcaggctgaggctgactccatgcggcagctgctcccaactccacaagggacacacaagccagcccttcccatccaggctgcacatgactgtgttttgtttcaaaggtcacatacaggtcacaaataaagaggccggttcccactggaggctatgtcaggattgatgcagtccctgagaaaaactcccggaaaacccagggactcccatgcgggctgagaaacattttgagtttgcatgagatcaaaataggagtcacagctgagtgtggtggctcacgcctatagcactttgggaggccaaggcgggaggatcacttgaggccaggagttaacagactgcagtgagctatgatcacaccactccactccagcctggacagcacagcaagaccctctctctaaaaaataaaaacaaaaatagaataaaataaaatacaatacaagagtcagcagccaggagggtagcctgtcccagagtggatgccctcaggttcaaggtttgacatcatctgcactaactgtgtgatctcaagttagccattatcttctagatgtcccattagtgaaataaaggggccagaacaaaaggaccctccaaagtctcaactggccctggccaacagcaaggcttcacagggctgcctggcactgcacaggggcctgggagcccaaggcccgagcctggccccacgacagtggttccattaacacaccaactcttcctgccacacacccagctggacaccctagaccagcggccagcaagcttcttttatgaagggccaaagagttggtatttcaggctttgtgagctagacagttgcagccttggctgccgtcacagggcaagagcagccataaattacaggtaagcaagtgggcagctgtgtccctataaaactttatttacaaagacaggtggcaggccagacccagccctttggccacagtttaccaacacgctatagtctctagggttgctgctgaaaaagatcacactacagcccactctgtccgcgtcctaacaaggcagcaagccttgttgtggggataagcaactatagcagtgaccctgggcagagcctataggcctcagtttccttgaggacacaaaaagagaccctgtgagtcacctctaccactaattccatggggaaatggagcaaacatgaggtggacgcagcccaggttcccctcaagatctcgggaataatatttcagagtagccgtgagcaggaggcacccaccagggcccttccccacagcagccaggttggaggtcctgtgaaccaggcgccctgatgcaatccagcaggcatccttatcacagtgcccactgagaccctaaggtcactccctccaggtgtaggggctacaagatccacagcaggaagctcattgtaccccgaaaagtcactgttttcagaaaggaaaaaggaacttcccaacccagcttaccctcctcaggcctgtgggaggagacaaggccaccccaagccctttgggttcctggtggggagtcacccttccgaaagaagggcaatgtgatggggtggccgcccccacccggccccttggcccacaggcccccactaatcagcctaccctggatagaggggcccaacctaaggtctccagggtgaacacagatggagacacaggccaatgcacgtgcgcgcgcgcgcacatacacacacacacacacacacacacacacacacacacacacacacacacacacacacacactcccctccccaactggaggcctggggctcctcctggaagtaggtggattccacctgcccacaggatcctaagaaaactctgctcctcctcttccctcccacccaccttcagcaaatgcctcagggctaggccaagggcagcagctggacccccccgcccagccagtgccccccagtgggctgtccctgacctgcaggacctccaggccacttctcacctggaagagacctcattttccacaaaagcttaatccaaaaagggctaaaaatagagattctgcacccatctgagctctttgcctgagaagggccctgaagcctcagtacctgcagggctcagaagtcctgccactgagaggctcaaccaccctggccaacctcacccaaggcccttcctaaccctcactgcttacagaaacccatgtcccagctgggcacgatggctcacgcctgtaatcccagcactttgggaggccaaggtgggtggatcacttgaggccaggagtttgaggccagcctggccagcatggtgaaaccccgtctctactaaaaacacaaaaaacttagctgggcattgtggcgcaagcctgtaatcccagctaatttggaggctgaggcacgagaattgcttgaacctgggaggtggaggttgcagtgagccaagaatcacaccactgcacactccagcctgggtgacagagtgagactcggtctcaaaacaaaaagagaaacctgcatcccaacacaggccgggcaaccgcacactggctatgcagaagcagggcacgtagccactgtcatctccactcagccccagcttccctcactgcagagccacaccgggctctccctgtccctttctctcacctgagcccaggtgatcctgctcgagaccttcctctgtcacctgtgaccaggtgactcctgggtccatccaggggcatcagaggccctgcaggtcctagctctcacaggacagtcacatacatgagggcatttaaatggctccaagaccaccccacacccattaagatggctaccatcaaaaaataaccagttcgggcaaggacgtggcgaaaccacaacccttgtgcacggctggtgggaatgtaaaatgctgcagccgctgtggaaaacaatctggcaaatcctcaaaaaattaaacacagaatgaccaaatgaggccgggagcagtgtctcacacctctaatcccagcactttgggaggccgaggtggacagataacctgaggtcaggagttcaagaccagcatggccaacatggtgaaaccccgtctctactaaaaatataaaaattagctacgcatgggccgggtgcggtggctcatgcctgtaatcccagcactttgggaggctgaggcgggcagatcatgaggtcaggagatcgagaccatcctggttaacatggtgaaaccccatctctactaaaaatataaaaaattagccaggcatggtggtgggcgcctgtagtcccagctactcgggaggctgaggtaggagaatggcatgaacccgggaggtagagcttgcagtgagctgagatagcaccactgcactccagcctgggtgacagagcgaaactccgtctcaaaaaaaaaaaaaattaacttggcgtggtggtgggcgcctgtaatcccagctacttgggaggctgaggcaggagaattgcttcaacctgggaggcagaggttgcagtgagtcaagatcacgtcactgcactccagcctcggcgatccaacaggtctacttctgggtatgtatccaaaagaactgaaagcaggggtttgaacagatacttacatgccctgttcacagtagcatggttcactacagtcaagaggtggaagcaacccaaatgcccatggacagaggaatggatgagcacgatgtggtccatccacaccacaggacatcagtctggttccctgcccactgcccaccacccaccataccaccggagggggcctgatggagaaggtggaagtacagggggccccagctccctctgacagtgctgtgggctttccagtgggaaaattgctaaagaaaccaggaagctggccaggcacagtggctcaagcttgtaatcccagcattttgggaggctgaggttggaggactgcttgagcccaggagttcgagaccagcctgcgcaacacagtgagaccctgcctctacaaattaaaaaaaaaaaaagggccgggcacagtgactcacgcctgtaatcccagcactctgggaggccgaggtggatggatcatgaggtcaggagttcaaaaccagcctggccaagatggtgaaaccccgtctctactaaaaatacaaaaattagccgggcatggtggcagatgcctgtaatcccagctactggggaggctgaggcaggggaatcgcttgaacccagggggcagaggttgcagtgagccaagatcatgccactgcactccagtctaggcgacagagtaagactccgtctcaaaaaaaaaaaagaaaaaaaattagttgagtgtgatagcatatgcctgtagtcccaactactggggaggctgaggtgggaggatcgcttgagcccaggatgttgaggctgcagtgagctgtgatcacgtgattgcactccagtctgggcaacagagcagaaagctccgtctcaaaaataaagaaataaaaataaagaaacaggccaggtgcggtgactcacgcctgtaatcccggcattttgggaggccaaggcgggcaggtcgcttcagctcagaagttcaagaccaccctgggcaacatggtgaaaccccatctctacaaaaacatacaaaaagcaaccaggcgtgatgatgggtgtctgtagtaccagctatttaggaggctgaggtgggaggattgcttgagcctgggaggcagaggttgcaatgagccaaaactaggaagccagttctctatttcagaaaaaaaacaataaaaccctaacagcagagctataggagaagctattttaaattttggaggctttgctttctgggatcattttttgggtcaacgaggagagcagctgacacctcgtgcacagccagggagaacaagcctgtctcacctctaggacaacaccttcacctgaattgggaagttgaggctcagggagggtgccagcagcctggagccccaaattgtcagtgggagcagcgccaccaatgtacctgatccccaatatgcagttctcagcatccttcaagagagacgcctctttgtgaaaacattttcaccaacatataaaaaggacacggggcgcaacaacagcatctcatgaagagctgaggcccccgatgggcctgggggaaggacaggggtgttaacagtagggtatatacttgcggtctccccatctgaagaacggtgagaaggactgaccacagccctccatcaccagcagctcaatttgtccaaagaggagcaagccaagcggggctgagctgccttccctggcctcaaaatcgcagcctcatactccaggctccactcacagacacatgggcatgccaggccgtggcctgtgctgggtcacctgcctcacctcacctcatcgctctatgtagcctcactacgggacagtggactggcctgtacacacacaaggcctgcagcatccggacatccccagaaccaagcatagtgccaagaacacaaaaatgcccgaagaatactgacctgtcaggctccacgatgcacagaaggtgcagcattaaaacataaagtgttcagggaagaagagacgcaaaaccatatgattgtgccactatgacaacacggtacacccaggcgagacagaggagggtgcaaaggtgtcaacagaaattacctggggcaatgagaacagacttgctaattttaggtacattgcaggctttctaccctgagttatactgcttatatagtaaaaaggaaaaaaaaaacttcacaggatgcttttaaaacaggagttcaggctgggcccagtggctcacgcctgtaatcccagcactttgggaggctgaggcgggcggatcacaaggtcaggagatggagaccatcctggctaacacggtgaaaccctgtctctactaaaaacacaaaaaattagccgggcgtggtggcgggcgcctgtagtcccagctacgcaagaggctgaggcaggagaatggcatgaacctgggaggcagaggttgcagtgagccaagatcacaccactgcactccagactgggcgacagagcgagactccatctcaaaaacaaaacaaaacaaaacaaaaaaatcggaattcagttattccacaaacttgaccagaactcgaagccctaccccttcacaaacacatctgctggcctggctgcctcagtcaggagccgtgtctccacttggtcaggagggtccagccctggaggatataattagcatcagactctggggcccactgccaggtcagatggaggcgggaggtctctaggacgcttttatctgggagaatagtctccctgcggatggtttatttggacaccagcttttttcattaaaaagcaaagtgacagccgggcacggtggctcgcacctgttaatcccagcactttgggaggccaaggcaagcagatcacgaggtcaagagatcgagaccatcctggctaacacggtgaaaccccatctctactaaaaatacaaaaaaattagccgggtgtggtgacgggcgcctgtagtcccagctactcagaaggctgaggcaggagaatggcgtgaacctgggaggcagagtttgcagtgagctgagatcacaccactgcactccagcctgggcaacagagtgagactccatctcaaaaaaaaaaaaaaaaaaaaaagcaaagtgacaaaataaccacatgtcatggccatctctgtcattcactgcacctgcaggtcacaggccatttggatgcattgttctacatttccctttggactctgtggctgactacacaggtgagattgaagacaaccctgtccatgagattcagagaccaaggagaaagtgtaacaactgaattcatcaaggcagaaagcacaacggggagcaagaccctaaaacaaaggacacagaagaggccaaacccaaaatgtgcagtatcaatcacaagtctgtgccctgccaggtgccttaaacaaggctgatgccccctgagaagcagacctctgaaaactagggtctcttccctgggcagctgcttcgagcccagggctacgtggagcagagaggcaatcctgtttgtcaggctggcgggttcctccctcaaggtctcccagtcgggatgtcacaatccgggtgtgatgtcaaaactgcttcaaaggtgatgaactacggccttggccgtgagtcaacagaggggtgggtttccgagtgagcgctgcctgctgtttacacacaatcacagccacggcaaccagctgaaagcacagtcaagggtcacgatgccgagtgcagagctcagtccctcacacacactcttgcctgcctcctgcagagactgccagctcgggcccacagactcaagctggcttgtcctcttctagcaccttctgggagaatccacccagaaccaccaaatgctcaccttgaaacacacaggcaaaccataccctggtgcaccagtgggccactcctgatgcctcctggcagcccacctgttccaccccagcccatccagcggccacagtccttcagaggtggcagagcccaggccatgacacttggattctgagttctcagctacttcccagctgggagatcctgcctggtgattcagcctcctccagagtctccacccatatcctcacctaagaaatgggaactgctcccaccacggggaagatgggatgaaatgcagtactgtgggtggcacagccagcactggcggggtggggcaccctccacaggtgtaggtgcccatcacctttccactttcttgggggagggggtccagcatagccagcaaccggaggaatctgctcagtcactcacgtcaccaaggttcgggcctcttggggacgcggaaagttgcatttaagtgaggctcaggaccccagtgtgactccccttcaggtcaagacccctgcaacctcaaaagatagtttggcttgagcactcaagaggcagtatgggccagtgaggacagccgagcacccttggacaggtgatgccgcctctcagagcctcatctgtccctgtcgtgaagggggaccataaacttcctctcccggcaagtggtcaagatgatgtgcacccatgggaagggatgggggtctagcccagggccaacaggggcagcactagcactaggtctctaaagaaggccttctctgaaaagcaggcagggctggcaagaagctgccctgctcagaaccaaggggggtgcccaccgggaagggaagataagtcgggcctctggggccctgctgtgagaatggatcacaggctgaagtaaggctcctcctgccaccggtgccaagggtgacatccacacagcccacccacttagcagcagacagtagcccccagcacagctccagggccacccagaagagctgagtactggccacaggcctgaggcacagcacccctctacctccactcccttcacacccttccctgcgacagcacaccggccatgcctgggacccttcccccagcagactgcagctccgtgtcacctgctggaagcactcactgactgccccacctatacccctcaccatcattaacgttgaccgccggtgagttactcttgctaatttctgtgccatccttcctgttcatgaattctgtctcctgccactagaatgtcagctcgtgacatgaggggcccatctcaatcactggtgggtatcccgccctgagccatgggcactgaccagaggctcaatcataccaggttagatgagtgatctggagtctcccaccggctctgtacgaacctccaggcagggaccagccccccaggagccagctctgggtccattcactaagggctcagagcacaagaggggtcaggttattctcctcccaagaggaagagaatctggaactcagaaagggtcaggcaccaggatcctcacagccctgagagaaggatctggaacttgagggagcaggtcaagtactgctgaccccagttctgagaaggattcggagatgggaggggtcaggcactcacccatggcctcaggaggcaggtggagctgagattcaaatggagagaggctctaatccccaggcctcctgaagcacttcctgggccctcatttttttctgaacaacggtgtgctcctctccaccaaggagcttgtgatccaaaagaggtcactcagcaacagagcccatgcaaacacctaatgatgaactacaacccaagtgcccctgggagggtcacttcctcagactgaccagaggctacttttccaagcaggtgagtaacactgtcctggaaggagggggtgtgtccatgcttccactctcccctctcccagaaatcactcatcagagcaaaccgggagatccacaagaacagccacctcacaacccatgaaggtttcgttttgttttttgacacagggtctccctctgttacccaggctggagtgcagtggtgcgatctcggttcactgcaacctccatctcccagattctcctgcctcagcctcccaagtagctgggattacaggcatgcaccaccacgcctggctaatttttttgtatttttagtagagacaggttttcaccatattgtccaggctggtctcaaactcctgacctcaagggatcctcccacctcagcctcccaaagtgctgggattacaggtgtgagccaccacgcccggccatcccatgcaggtttttatattcaaagaaaaacagacacgtagttcatgcctgtaagcccagcactttgggaggccgacacaggaggatcccttaagcccaggagttcaagaccagcttaggcaaaatggggaaaccccatctctacaaaaaaaaattttttttaattaaaagaaaaagaaaaaaactgggccaggcacaatggctcatgcctgtagtcccggcactctgggcagctgaggtgggaagatcacttaagcccaggagttcaaggccgcagtgagctatgatcacaccactgtactccagcctgggtgacagagtaagaccttgtctcaaaaaaaaaaaaaaaagaaggagaagaagaagaaaagaaaagagaaaaactaggccaggcacgaaggctcactcctataatcccagcactttgggaggccaagggaggaggatcacctgaggtcaggagttcgagaccagcctgaccaacatggtaaaaccccgtctccactaaaagtacaaaatttgtagggcatggtggtgcatgcctgtaatcccagctatttgggaggctgaggttgcagtgagccaagataacaccattacactccagcctagcaacaagagtgaaactctgtctcaaaaaacaacaacaacaacaacaaaaactaggccaggcacgatggctcactcttgtaattacagcactttgggaggctgaggcagggaaatcacttgagccccggcgtttgaaatcagccttggcaacatagtgagaccccgtctctacaaaaaaatttaaaacttagccaggtgcagtggtgcacacctgtggccccagctactcaggagactgaagcaggagggtggtagttcgaggctgcagtgagctatgatcatgccattgcactccagcctggacaatggagcaaaaccctgtctcaaaaaaaaaaaaaaagggggcccagcgtggcgactcaagcttataatcccagcactttgggaggctgaggcagatggatcacttgaggggtcaggagtttgagaccatcctgaccacatggtaaaaccccatctctaccaaaaatacaaaaattagccaggcacggtgatgcgtgcctgtaatcccagctacttggtaggctgaggcaggagaatcacttgaacccgggaggcggaggttgcagtgagctgagatcacgccagcgcaatccagcttgggcgacagggcaagaccctgtctcaaaaaaaaaaaaggaaagaaaaactgcacaaagtccaaggtagagtgagaaggccagcagctatgtgtactgctgcgcctttaccttccaccacgctgctccagctggctaccaggtcaacaccagagccctctggggagagaaaacaggagggcttctacctgggctgttcccagagctaggattacctgctcctgggagccacagagaaagttccacagcaagttcctttctagcccctgccacacctgaatttgtaaaagcctcttcacaattaaaaactaaaaataggccgggcacggttggtcacgcctgtaatcccagcactttgggaggccgaggtgggcagatcacaaagtcaggagatcgaaaccatcctggctaacacgaaaaatcgcaccactgcactccagcctggacaacagagcaagactccgtctcaaaaaaaaaaaaaagaaattaaaaataaaagccctctccacaagttgcaattggcaaactatataaccacagcatcgaggaatacaaaactctggcttctgggtgatagagttgtccacatgagagtttgtccataaccagtatatttctctggttacacaatcaagttcttcaagccaccttcctcaagctcactacccaaaaccacagagagcacggagctgccgtgccttagaaaagtccatccactatactgccccatgggcaagattaaattcgaaagtagccaagctggctgggagcagtggctcatgcctgtagtcccagcacttttagaggctgagaaggacggatcactggaggtcaggagttcaagaccagcctggccaacatggcaaaaccctgtctctactaaaaatacaaaaattagccgggtgtggtggcacgtgcctgtagtcccagctactcgggaggctgaggcaggagaatcgcttgaacccgggaggcagaagctgcagtgagccgggatcgcgccacctcaatgaagcctgggcagcagagtgaaactccatctcaaaaaaaaaaaaaaaaaagaaagaaagaaagaaagaaagtggccaagccacttaaattaccagacagctttttgagaaaaatccaagtttgaatcaccccaaaatataatccagccagccaagttgctctggatggcttggaaaagttcttctaggaagcccctcctggctggtcaacacactgccctacacagctgggctccgagccagaggagtttaacagtccacagttaccttcaccctaacatgaggaagatccagcttagagaggggatgtaaccaataccctaaagtaaaaatagcagtgtgacagcatgaggtggacacacaggcggaccttctggactgaaaagcaagcgagggcagcatcagagagaaggcggagctcctggttcctaaagcacagaagacagtggtgaccaggtaccaagtccatcgtagttatatgactcacgagctctcccccagctgtttctaggaaagcctgccttcctgcaggacaagtcagaatcgctcagggaaaaagacccagggccagaattctaccaggaagagaggctctggctggtcatgggccagcagctgctgtcgctgccactgtctcctcctcacctgcaggggcgccttagcctcatcttggggagtctttttgacaaggtgcgaacttgctctttcaaaaaaaaatgaaatcctcattccatgaaggggaaaactgcgacaccgggacagggaggaaattgcccaaagacatgggaagaagcacggaaggggtgggcaccgggagagtggtggaaacgaaacagggggaagaaattctcggcttagctaatggagctgaacaagttcggggcaggaagaaagccacattccttcctagttagtctccctcctcccccgcccgcggcacccccccacccccaccatcaacagtatacacaaacacacacacacgcagggagcagggctctctgagcccgagactagacccacccccactccctttagggcaatgaagcccccaatttccagaaaaggagttacaaggttcctaaaccacttcccctcgggacctgaccactggtcatctgcaacttctgacccagcacagacggggggagggggggccatgacacaaacagaaatgaaaaaggcaggtttctgaccacggccccagatgcgccccaaagtcaggcccaagagaacatacacagcagcctcccctccccaccaccagccaggtggcagaaccgaaacgcctcaaacttcccccagatgggcccaaatcggcctctgagaagttccagagtcagcggccagatgtggtagccagagcttcctcctgggtggcagggatcccctacatgtgccctgaggataacatcacagccgcccccaacacttccactctccaaggaacctctctccggagagagagggtcacctgggggtaaggggagcagaaagctgggacaagctgtcagtttctgcccaaactccccgtcccaagaaccaaagtggcccaacctgagtggcttcatcggaacgcgtcaaagccagcccccagctgcaaagccttccacccagacagaacagacccccacaagtgcctcgctgaccaccccctgccgggcacccagacgatcgctgcttcccaggaggacagacacagtcacccccaccaacggcgctgccccggccccagatggaaaagcccccagcttccccctatcacggtgccgggaccgtgcggcccaccgcctcctcgccccgccgccaggtgcgcaaactggaccctgcccaggtgcccagcaggccagaaaggccccggacgccgccaggtgccgacaccgacgccccccgggcccggcgcgcgagtctgggcccctcagcagccccgggccacccgcctgtattgcctcctagtgctgagaaggaacgcggttctcagcgctccaggccggactggcgcccactccgcgccccgccggcccagggacccgcgagcagcaccacagacctagcgtctccgagcccggacgcctcagtgaggggagcgcgaggccggcccgcgtccggacgttccccactggcgcgccgggcgccatgccactcacctgtctggcgcggtagctctcgaaggccctcagggcactgtcggtgagcttcacgtggaacaccgacaccttgctgccgtcgctaacccgcccgcacgacagcccgtagctcctatcctccttcagcgccgccatcttgcgaccatctctcccccgcgcccccttcccggctccagcgccgccacgccggccacgccccgccccgccgcccgctgacgcgctgcattattcatgagacgcggctggccacgccccccgagtccgaccaaaccaacagtcgccgccacaccggcaggcagcgcactacattattcaggagacgcgcctggccacgccccatgagggccccacaaggcccacagtcaacgccccaagttgttgcatattcataaggcacttatggccccgcctcttcaggccctaggggtggccacttccgtgaacgaactccgcctcaacacgcgcacccctccaggccccgcctccatagtattatacataaccctgactcagccagccaggcgcgtcaaagccccgcccctacagccgctgacgtgatgcattatttatgagatctctacagtcttccgtctttggcttctgtggaaagccgcagagagggcgtggaggggcggagccggctcgaaacacgtgggtgggtaggccccgccgcgggccgggagggtgggcgtggctatgtaaacggagcgcgcgcgttggacgctgggttggacacataaggcatcccttaggcggggtggatgggacttccacccagggaaggtgctggaccggtaggtggaagaggagctggtaaactttttcttatgagatgagtacttttaataggataaaatcctacatccccacagtccctgagcgatggtgcagtccagcttcattttcctattttaatttttttttgaggggtcttgctgtgttgcccaggctggagtgcaatggcgccatcatggctcactgcaccctcgacctcctgaactcaaactgatcctccttgtctgggtctgctgaaatgctaggattacaggagtgagccaccaagcccagacttccattttcttttcttttctttttttttttttttgagacggagtcttgctcatcagcccagactggagaacagtggcgctatctcggctcaatgcaaccatcgtctcctgaattcaagcgattctcctgtctcagcctctcgagtagctgggattacaggcgcccgccatcatgcccagctaatttttgtattttagtagagatggggtttcaccatgttgaccaggctggtcttgaactcctgacctcaggtgatccgcgcgcctcgccctcccaaagtgctaggattacaggcgtgagccacctcccccagtttttgtttgtttgtttgtttttagacagagtttcgatttccttgcccaggctggagtgcagtggtgtgatctcggctcactgcaaccaccgcctcctggattcaagcaattctcctgcctcagcctcccgagtagtagctgggactgcaggcgcccatcacaacgcccagctaattttttgtatttttagtagagacgggatttcaccatgttagtcaggctggtctggaactcctgacctcaagtgatgcacccacctcggcctcccaaagtgctgggattacaagcatgagccactgtgcccggccagccttccattttctaaaaagcaacttcattgagtcacattttacatataaaatatattcccaatgctgtgtagctgtcaccactatctaatttccgagatttttttttctttttctttgagacagagtttcactcttgttgcccaacctggagtgcaacggtgccatctcagctcgttgcaacctccgcctcccaggttcaagcgattctcctgcctcagcctcccgagtagctgggattacagatgcccaccaccacgcccagctaatttttgtattttcagtagagacggggtttcaccatattgatcaggtctctaactcccaacctcaggtgatccgcctgcctagggctaccaaagtgctgggactacaggcgtgagccactgcgcctggccaagggaggagctggcttggagggccaaccagctcgctctgtgatcttgtgaaaggcacctcctgcttctgagcctctgtggattcacttcggaaacaggaaacagcaataagagcagtactcaggacctagcaaggtgtctcacacctgaaatcccagcattttgggatgccatgacgggaggatcgcttgcacccaagggcttgagaccagcctgggtaacagggctaagccccctctctacaaaaaaatttaaaaaattaaaaaaattagccgggcatggtggagcacccctgtggtcccagctactccggaggctgacatgggaggctctctcaagcccatgggaggttgaggctgtagtgaactatgttcgcaccactatattccagcactccagcctgagtgacagagtaagaccctgtctccaaaaaaaaaaaaaaaaaaaaaaaaaaaaagccaggcccccagtggctcacgcctgtaatcccagcacttttgaaggccgagggggctggatcatgaggtcaggagttcgagaccaccacgaccaacatggtgaaaccccgtctctgctaaaaacactaaaattagccaggcatggtggcacacgcctgtaatcccagctactcagaaggctgaggcaggagaatagcttggacccaggaagcagagcttgcagtgagccgagatcgtgccactgcactccagcctgggtgacagagcaagactcggtcccaaaaaaaaaaagtatttctccacgtctactttacatttgattccccagtggatctcaatgagaccccaggaaaaataaggcagaacttatcagacgttggcatgctctgcagaagtttcttttttttttttttttttgagacggagtctcactctgtcgcccaggctggagtgcagtggcacaatctcgggttcactgcagcctccgcctcctgggtccaagcgattctcctgcctcagccgcccgagtagctcgggttacaggcacgtgccaccacgcctggctaattttttgtatatttagtagacggggtttcaccgtgttagccaggatggtctcgatctcctgacctcatgatccgatgatccgcctgcctcagcctcccaaagtgctgggattacaggcgtgagccaccatgcctggcctttttttttttttttttttttggagacaagttctcactctgtcacccaggctggagtgcagtggcatgatctcggctcactgcagcctccaactcctgggctcaacccatcctcccacctcagcctcccaagtagctgaaattacaggcatgctccaccatactgggccaatcttttgtattttttgaagagatgagatttttccatgttgcccaggctggtctctaactcctgggttcaaaagatcctgtcgcctagcctcccaaagtgctaggaagtgctaggattataggccataagccactgcacctggccgtctgcagacatttttgtttctttgttttgagacggagttttgctcttgttgcccaggctggagtgcagtggcacgatctcggctcactgcaacctctgcctcctggttcaagtgattctcctgcctcagcctcctgagtagctgggattacaggcacacgccaccacacccagctaattttgtatttttagtagagacgggatttcaccatgtaggtctcgaactcctgacctcaagtgatccacccgcctcggcctcccaaagtggtgggattacaggcgtgagccaccgtgtccggctttgtctgcagaaatttttaagaactaggttacccatggccaggcatggtggctcacgcctgtaatctcagcactttgggaggccgaggcgggtggatcacttgaggtcaggagatcgaaaccatcctggctaacacagtgaaaccccgtctctactaaaaatacaaaaaaattagccaggcattgtggcaggcgcctgtaggcccagctactccggaggctgaggcaggagaatggcgtgaacctgggaggcggagtttgcagtgagccgagatcgcgccactgcactccagcctgggtgacacagcgagactccatctcaaaaaaaaaaaaaaaggaactaggtcacccacaatattgcaagtgagttgatcaccctggggtgccccccggacacatagtccacctggtgagctctctgatggaagcagtgaccccaccctgccccttaccccgtgtgtggtcttggacacatcttgccatctctgttcctcagtttgctcatccagaaaacagggagtgtaacagcatctacctgattcttctgtgacaatgacatgagacaaggacatgtgtagctcgccctgttcaagtgttccagaattgtgagctcgcgtacacatacaaaattccttccgcagtgctcacttccaattcacagcccatggcaagtcgggtaaggccctcctgagtcactgctcaaggccaggtatatgggaggtgttagtaaatgctttggtatgaaagacaaagccatccccgtcgttctccaaaggtaccacacatggtccagctggcataccttgcacagctatgccatccacaagggatacccttcaccacccattaaaggcatcccatgccttcaacacaactgcagcgtcacacgtgctggatgctccagctcaccacccacaaccagctcagacctttgaggatgaagtggccgagtgaataaccacattcaatttcacactcctagtctggccattcggggcctctctcctccccgtccccgcaccatgtcataacttgcatgttctaggcagctccgggcctatttcttttttctttttttgagatggagtcttgctctgtcacccaggttggagtgcagtggcgcgatctcagctcactgcaagctccacctcctgggttcacgccattctcctgcctcagcttcccatgtagctaggactacaggcgtgtgccaccacgcccggctaatttttttgtatttttagtagagacaccacgttggccagaatggtctcaatctcctgacctcgtgatctgcccgccttggcctcccaaagtgctgggattacaggcttgagccaccgcgcctggccagcggggctatttcaactccagacattggcaccggcagtttgcttggccaggaaggacatttccttcctttaataaagcttttttaaaagtttatcaaacaagcagccaggagtagtggctcatacctataatcccagcacttagggaggcagaggtgggggaatgacttgaagtcaggagttcaagaccagcctggtcagcatggtgaaaccctgtctctaataaaaatacaaaaattagccgggtgtggtggcacgtgcctgcagtcccagctactccggaggctgaggtaggagaattacttgaacccaggaggcagaggttgcagtgagccgagatcgccccactgcactgcagcctgggcgacagagtgaggctccgtctcaaaaaaaaaaaaagtgtatcaaacaagtgagtgaaatattaactatcagtctcacatttagccaggtctaggctgcaattcaagactaaaatattggctgagagcagtggcacgtgcctgtagcccctgctacttgggaggctgcagtgggagaatcacttgagtgcagtggggtgggtcaatgctgcagagagctgcaatggtgccactgtactccagcctgggtgacacagcaagaccgtgtctctaagaaaaaaacaagactaaaatatcttaggagctcctggattgaagaaattctgtatcttaagatttgtatgctggccaggtgtggtggctcacgcctgtaatcacagcactttggaaggccgaggcaggcggattacgaggccaggagttcgagaccagcctggccaacaaggtgaaaccccacctctaccaaaaatacaaaaaaattggctggacgtagtggcactcacctgtaatcccagctactttggaggctgaggcaggagaattgctgaacccaggaggcagaggttgcagtgagccgagatcaggccactgcattccagcctgggcaacagagcaatactccgtctcggggggaaaaaaaaggatttgtgtgctacatgaacaggaaacaagttgactttgcattacgaaaagtcaagaggttctatatatatattttttggcgatgagtttcactcttgttgcccaggctggactgcgatggcgcgattttaggtcactgcaacctccgcctcctgggttcaagcctattcttctgcttcagcctcctgagcagctgggattacaggcttatgccaccatacccggctgatttttgcatttttagtagagatggggtttcaccatgttggccagactgttctcgaactcctgacctcaggtgatccacccaccttggcctcccaaagtgccgggattacaggcttgctatagggattctgaggcacaagaatcccttgcacccgggaggtggagtttgcagtgagctgagatggtgacactgcactccgacctgggtagcagagagagagaaaaagaaagttaatcaccaatgtggtgaaactccgtctctactaaaaatacaaaattagctgggcgtggtggcacgcacctgtaatcccagctactcaggaggatgaggcaggtgaatcccttaaattctggaggcggaggttgcagtgagccaagatgcaccactgcactcctgcctggatgacagagcaagactccatctcaaaaaaaaaaaggccaggcgaggtggctcatgtctgtaatcccagcactttgggaggccgaggcgggtggatcatgaggtcaggagttcaagatcagcgtggccaacatggtgaaaccccgtctctactaaaaatacaaaaattatctgggcatggtggcgtgtgcctgtaatctcagctactcgggagacgaggcaggagaatcgcttgaaccgtgatctgggaggcagaggtagcagtgaacaagatcatgccactgcactccaacctgggttacagagcgagactgtctcaaaaaaaaaaaaaaaaaaattagtcaagcttggttgcgtgcccctgtaatcccaagctacttgagaggctgaggtgggagaactgcttgaaccctggaggcggaggctgcagtaagctaagattgggccactgcactccagcctgggtgacagagcaagaccccatctcgaaaataaataaataataaaaaaaattggccaggtgtggtggcgtgcacctgtaatcccagctacttgggaagctgaggcaggagaatcgcttgaacccgggaggcagaggtcagaggttgcagtgagctgagatcatgccactgcactccagcctgggtgacagagctggcatgcaaaaaaaaaaaaaaaaaattagctgggtgtggtggcacatgcctgtaatcccagctacttgggaggttgaggcaggagaattgcctgaacctggggctaaccactggaaagagagcacagcctcaagccacactcagcctcaagtcatccaggtgacccagagaacaagggcctggaagaagcgggtgagtgggtgaggtggaggtgtagattggagtcctaggcctttgggaggccctccaacctcccttctgcaccaacttctcctgggtggctgtggcaggcagctttccctcctgggctgtaaggggatagatgcaggtgaggtgactgtagtggtctattttcaaggatgcccttattcttgggggcaagatggaacagcaggaagaaagggtgtgggtgctgggctgacagaggccccgatgctggctccgcccatcctggctgcactggtgagcggcatcataggagaagctcccagagtccagagttgggagagccagatgggatcagggaacctcccagcatcaaccctggcccttcctcatggcccctaaagccctgcagggtatggctctgcaggctacccagcctcatccatctggaatgcaccaggctagacctggccccagggtctttgtactgggcgtgctgttgcccagacctggggctgtcggcttcctgcatgggcagacccttgccatcgctgaaatatcagcgcacacatcccctgggagaggtcttcctgggcctccagctgtgccttctcacaggctgcatccagacattcacatcctctcccctggaccccatctgtctcttgttttgagatgaagtctccctgtgttgcccaggctgcagtgtagtcccatgatctcggttcactgcaacctctgcctcccgagtagctgggattacaggcatgtgccactacacccagctaatttttgtattttaagtagagctggggtttcactatgttgggcaggctggtctggaactcctgagctcaagtgatccacccacctcggcctcccaaagtgctgggattacaggtgggaaccactgtgcctggtgcactttttttttaaacatagatggaatctcactgtgttgaccaggctgggctcaagcgaccctcccaccctggcttccaaagagctgaaattacaggccatgacactacaccccacctctttattaaaaaaaaaaaaaggccgggcgcggtggctcacgcctgtaatcccagcactttgggaggccaaggcaggtggatcacgaggtcaggagatccagaccatcctggctaacacggtgaaaccccgtctctaccaaaaatacaaaaaattagccaggcgtggtggcaggcgcctgtagtctcagctactcgggaggctgaggcaggagaatggcatgaacccgggaggcggagcttgcagtgagccaagatcacgccactgcactccagccggggccacagagcaagactctgtctcaaaaaaaaaaaaaaaaaaaagagccgggcacggtgactcacacctgtaatcccagcactttgggaggcctaggcaggcagatcacaaggtcaagagatcaagaccatcctgaccaacatggtgaaaccctgtctctactaaaaatacaaaaattagctgcgcatggtggcgtgcgcctgtagtcccagctactcgggaggctgagacagaagaattgcttgaacccgggaagtggaggttgcagtgagcagagatcgtgccactgtacttcagcctggtgacagagtgagactccgtctcaaaaataaataaataaataaataaataataaaaagagagacctcactctggtgaggtcttccagcctaggctggagtgcagtggtgcaatcatagctcactaaagcctcaaattcctgtgctcaagtcatcctcctaccatctgtctcttttgaattcagtacatccactaggtaaagcaatgatgccacagaacccatgcagcagcctcaaggtagggcccactggggtcctggatttcaggtgagtaaacagtgaacgctggggtaacgagtggagctgggcagtaacacccccagagtccagctgagtcagacctctcaacccacttgcccctgctacatcaccccacttctctatgcctcagtttctcctctgtaaagtgagtatgttgtgcccggagaggagacccccagctccagctggctcaaccacatccaccatgctgtgtgactccagatgcatcacaggctgtctctggcccagccccagacagcgggagaagaaagctcaggagtccgtggaaactgcagggtgggatgctttatttcactgtggcggggagggaacctggacagggggcggcaggcggggtggggggctggcactcaggcggggactaggcaggggaagggctgcccccaggcctgttgaggagaaactgaggccagccctggcggagacctagcccagcggggtaaggagggtgggggaaaactgggtctgaaggaatgagggccccctccctctgggctttcctcctagagggcctcagtccctcctgctggctgggctgcacgacccccaatccttgctcccctaacccggaggagggggccagaccagggagggcagtggacagggagcctgggggagttggggagcgcagggcagggtccatggtgtgcagagggggtggcagccacctaggtggtcagttcctggcagcgatgaccacagagagtgccacaccccccaaggcaacagcagtcgccccaaacagccacttccatgggatggactgtggataaaaaggaggggagagaagggtggagggaggtcaagactggcctctggggcctcagctgccagcacagcccaaacagacctcccaacaaatcattgcctgactatgtatttcccacttcctggcaaactcctactcatgcagcaaaacccaaatcaaatggcccctcctccaggacaccgcccctcgtgccctggaagaggctccacagtccacccccagccctccagcttgagttccaccttcgactccactcatgatcacacagggctgggctctctccacgtcccctgcatcgcccaggacggcccagtctccgaggacatccatgtatgcaaaataaaatccctctgctaggcgtgccctgcacacagcccctgcccattctgtgccccagctcacccaggcacccttgccagggcacttagcaggcagccggctggggttgcccagcattttccggtacaaggcggtctccgtgctccgctgcgccgcatgcttcttcaccagctttgagagctctgcgtggatcgtctgcagaaggcaggggaagctgagaacacgcagcggccaacctgtcatcactggcgctctgccttactgggaccctaggctgtttgggtggtgggactgttgggacacaggggtcccatctgcccctttctgggcttagcaaagtcagggctgctgaccccatccctcctagggagccaattgatggcgcagagcacaaggtagccaggagacaaaaggttctggaaggaaggccaaggacactggcatggagcaggctggcagtgccctcagctgctggaggagtgagagcccagactgcctgtgtggccgtcatgagggtcttcacaagctgaccaggacccttcaggtacctactccgtgccactgcccaggtgggaacacaacagagagccacagcaagaaagacctggggcagaccgcaggagggacttcccagccgagcaagtcccagggcacccctgtcctgctcaccttgttggaaggttccagcttcagggctgccctcaggatggggatggcctcactgtactccccctgctgggccagcacctgtaaggggaagggggtggcatcactctggacccatacctgggcctgtccttcaagaaatccagcccaggaggttgcagtgagccaagatggtgtcactgcactccagcttgagcaacagagcaagactccatctcaaaaaataaaataaaataaaaacagcctggccaacatggagaaaccccgtctctaccaaaaaatacaaaaattagccaggcgtggtggcatgcacctgtagtcctagctactcaggaggctgaggtgggaggattgcttgaaccagggggcagaagttgcagtgagccgagatcacaccactgcaccccagtctgggtgacagagtgcaaccctgtcttaaaaaaagaaaaaaaaaaaagggtcgggcgcagtggctcatgcctgtaatcccagcactttgggaggccgaggcgggcggatcacaaggtcaggagatcaagaccatcctggctaagacggtgaaaccctgtatctactaaaaatacaaaaaaaattagctgggcgaggtggcgggcgcctgatagtcccagctactcgggaggctgaggcaggagaatggcgtgaacccgggaggcggagcttgcagtgagccgagatcgtgccactgcactccagcctgggcgacagagtgagactccatctcaaaaaaaaaaaaaaaggctgggcgcggtggctcacacctgtaatcccagcactttgggaggtcaaggcaggcggatcaagaggtcaggacgtcaagaccatcctggctaacatggtgaaactccgtctctactaaaaaatacaaaaaaattagccgggcatggtggcgggcgcctgtagtcccagctactcgggaggctgaggcaggagaatggcgtgaacccaggaggcagcacttgcagtgagccgagatcacgccactgcagtccagcctgggcgacagagcgagactccgtctcaaaaacaaacaaacaaacaaaaaaaacagccaggctcctggctactcatacaagtgccaaatggagctctggcaacatccctgggttccagccactcccaaactgctctcctagccctcaaactccatcagtgcacacttagcttggcattggtccccgcaacatgctcctccttcctgtctcagctgcagatctaggcacccacctcgctgcctcctccctcaccacctccactggcgagaggccgaatggatgcttccagaggttgttgttttttttttctctttcctttagagacagggtcttgatcggtcacccaggctggagtgcaatggcatgatcatagctcactgcagcctcaaactcctaggctcacacaatcctccagcctcagcctcccgaggagctgggactacaggcgtgtactaccatgtccaacgaattatttatttatgtatttatttataaaattattattactattgttattattattattttgagatggagtctcactctcgcccaggctggagtgcagtggcacgatcttggctcaatgcaagctctgcctcccgggttcacgccattctcctgcctcagcctcccgagtaactgggattacaggcacctaccaccaccggctaatttttgtatttttagtagagacagggttttaccatgttggccaggctggtctcaaactcctgacctcaagtgatccacctgcctcagcctcccaaagtgctggtattacaggcatgagccaccgctccaggcctacttatttatttattttattttagagacagggccatgttccccaggatggtttcgaactcctgggctcaaccaatccacctgcctcggtctcccaaagtgctgggattataggcgtgagccaccacgcccagcccttaattattttttaaatttttgtagcaatggggtctcactatgctgccaagactggtcttgaattcctgggctcaaatgatcctcctaccttggcctcctgaagtgctgagattacaggcgtgaggcaccacacctggccctgatgtttccaaagctttggccatagtgaatgattcaggaccaggcacatgacccaaatgagtcaatgagatccagcctgcactatgctggtgctgatgggagatgggttgctaaggggagaagatggagctgggcgaagtggctcacgcctataatcccagcactttgggaggtcaaggcaggtggatcacttgaggtcaggagttcaagaccagcctggccaacatggtgaaaccccgtctatactaaaaatacaaaaaaaggctggatgtgctcgcttgaacccaggaggcagaggttgcagtgagccaagatcgtgccactgcactccagcctgggtgacagagcaagactctgtctcaaaaaaaaaaaaaaaaggagggggtagaagatggaaatctgtaactttccaggggggaggggggagcatcatggtcaccctgagagaggagccggcccaggagggaaggtcagagcagagaaacagcatccccacaatattgtgagtgcctggatccagctatgcctgaagccagctaatccaaacttggcagttccatgagctatcgatccctcctttctgcttgaacctgtttgagtgggtttctatcaccttcaaccagcaggtccaaacttgtatgaagctacacaagcagccactcctgctgcccccaggaggatactacccccaggttgagaacaaagccttcaaaaacaggaactgcatcttctccctcttcatatttctctgcagaactccgcacacagtatgtccttaataaatcccagctggagggagccccacctcaggcttttcagaaacacagcaggtgagccagtatctgtgcctcagtttccttcgttaactgctaaaaggtcctgaaagccccacctaggggtgaggctgtgaggatgaacagaaaagggggtgagaatgaaggtcaagtctgtgcaagccagattcacccctatgttctgccagaacttttttttctgttctcgtgttttgtttttgacacagggtcttgctctgctgccaaggctggagtgcagtggtgtgatcaaggctcactgcagccttgaccttcggggctcaagccatcctcagcctcctgagcaactgggacgacaggcccgcgcccccacacccagctaatttttgtatattttgggtagagaagggggtctccctatgttgcctgggctcgtcgcaaatgtctgggctcatgcgatcctcctgccttggcctcctgtaatcccaagtgctgggattacaggaatgagccattgtgcctggcctctgccaggacttttactgagcacctactatgtacctggccctgtttgcaaggctggagatccggcagtgagcaagacagaccaaatctccacctttgagtaaggtagatggacaagaggcatgtcacctccacgtgctgcctgtcaggaacatctcagacagtcggcaatgcctacgcaaaggccctgaggtggagagagcctggctagacagcagaaagggagaatgccacgtgggatggagagaagcagaaagtgaggtgggagaagtgatagcaggagggggaagaccagacaactcaaggccccaagggctgtgactaggattccactttactctgaggaaaactgggacccatggaggttctatgggaggaggtttcaacactgggccaagccgggcacggtggctcaggcctgtaatctcagcacatggggagactgaggcgggcagatcacttgaggtcaggagttcgagaccagcctggccaatatggctaaccacatctctactaaaaatacaaaaattaactgggtgtggtggctcgcacctgtagtcccagctacttgggaggttgaggcaggacaatcgcttgaacccaggaggaggaggttgcggtggtgagctgagatcacaccactgcactccagcctgggtgacagagtgagactctgtctcaagaaacaaacaaacaaacaaacaaaaaacactgggccaaaggttggggacccaagactcgaggatcaaattctggcctcagccaatgaattgttgtgaccaggccacactcctgcacccgtctgggcctcagtttctccacctgcaccccacagagctcagctggcttatatacctatgcctttctcaaatgcagggttggggaccaccccgtataccccaggctgagtgacccggcctggcaccccggtgtggcctaccttgcccttgcggaagagagccttgatgttgtctggctggtgctccagcacaaggctgcaggagcgcagggctgcgcggtagtggtcgagcttcagctgcgaggccgccaggttgttcagacacttcaccttcaactgcaggagctgtgcctcctcctcgaacgtcatgtccactattgggagacagtgcccgccacggcagccgtcaccatgccaccagacaccccggcacccacccctctgcggaggctgcctctctggcctcagtttccccaattttaaccccggaccaagggccacgctttcctggggctctcctgaggaagctacaagatggagacttaagcaagcgagggcctagcctgtggtacatgtgaactggccctgtctatggtcaccccatccccatatccacttgcattctacaacactccactggtctgggatataccacgagtctgtaacaggccctagcttaggggcagttggggatctacccatattctgggctattctagaatattctgagtctgaggctctctggggctggaagtttctggcacggagtggacacctttgcaggggagatggtggagatctgacccaggcggtcacctttggcgctggaggtgatagccttgatggcgaggtcgtaggagttggcggccaggacgaagtccgcccgctggtagtgggcgttgccgcactcccgcttccggttggccagggccacgcgctcctgccccgtgagcatctccaggtcaggcccgtccacagccgtcttcagggtcacctccaggcacagggccgcgtgcggggggatgtatgggctcctgctagttgggtgggagcaggcaggggcagcactcagacctggtgacccctaaacccgctgggctggctaggaaggagtgagcttggctcaagcccccgatctgtctcccctctgccctccatcattccctcctcagtaaagtgcaggggaagtgacttgccgccttggagctgcgggacttgacgaacgagttcccctccctaagcctcggttttcctcctttttattaagagacaggttctcactctgttgcccgggctggagtgcagtggtgcaatcttggctcactgcagcctcaaaaacgtgggctcaagtgatcctcctgcctgagcctcctcagtagctgggactacaggtgtgcaccacacccagcttttttttttttttttttttttttttgagacagtcttgctctcttgcccaggctggagtgcagtggtgcaatctcggttcactgcaagctccgcctcccgggttcacgccattttcctgcctcaacctccagagtagctgggactacaggcacccaccaccacgcctggctaattttttgtatttttagtagagacggggtttcaccgtgctagccaggatggccttgatctcctgacctcatgatccacccgccttggcctcccaaagtgctgggattacaggcgtaagccaccacgcccggcccacacccagctaatttttaaatttttttgtatagagatgcggtctatattgcttaggctggtctggaactccaggtctcaagcaatcctcctacctcaacctcccaaagtgctgggatttcaggtgtgagccacctcacccagcctcagtttcttgtctataaaatgggcaagtagatggggtgagccgaggggtacacccactccacccatccccctcctgagacctgcagagacctaagggtggctgactctcacctgccttgggggccgtagcagtacttggagtcagcagtgaccatggccgtctcccccacgtccatgagtgggacactgagatccagggcctggggtgtgtggggatagccagctgtcaggcagactcagacccagcaaggcacgcccctcgcccctgccctgtcccgccccagcccgcacctggatgacgtcacagtcacccagagtgaacaccagctccggctcctcctgcacccgtgtgccattctccagcgacgtctgcagatgtacggtgaccacctggcccttgaccgggcggctcgaacctggcggccctgggaccagcgtcttcttcctcaacagcccgttccctgccagggtccagggacatgcagcctgtcacctggcagctcaaacaggcacccgctcccctgagcccccactcctaccctcagctctgcccactagctgtccagagggggctggcccaacactggggcacaaaccaaacttccaatggccactctgccaccagagtggggaaccccacgtgcaggacactgggcaggatgggacagacttcagggtgacagtgctggtgctagagaccagctcagtgaacaatggttggtctggtttttttgtttttttgttttttttttttaagaaaactgagacttgccgagtttccatctatttgagaggccaatgtgggagaatcacaagttcagcccagcgtctgggcaaaatggcaagaacccagtctccccaccctcctcaaaaagaaagaaaaccaaagctcagagaggacaaacagccctcaggctgaaatccttgccctgagatgtttgggcctcggtttacccagccatgaaatgaggtgctcatgggacctttggttagcagagcccctgtgacacagtgtccccaccacagcaccaagtgggatgaatttataagttaagcaaaggacacacatggtggctcatgcctgtaatcccagaactttgggaggctgaaatgagaggactgtttaaacccaggagtttgagaccagcctgggcaacatagtgagaccccatctctacaaaaaataaaaaatgaccaggcatggtggctcacacctgtaaccccagcactttggaaggctgaggcaggaggatcacttgaggttaggagtttgagaccagcctggtcaacatggtgagaccctgtctccactaaaaatacaaaaattaggggccaggtgtgctggctcacacctgtaatctcagcactttaggaggccaaggcaggtggatcacctgaggtcaggagttcgagaccagcctggccaatgtggtgaaaccctgtctctactaaaaatacaaaaatcagccaggcatagaggtgggcacctgtagtcccagctactcaggaggctgaggcagaagaatcgcttgaacctgggaggcggaggttgcagtgaactgagatcgcaccactgcattccaacctgggtgacagagtcagactctgtctcaaaaaaaaaaaaaaaagtagtaagatttttatcagtagtggtggtgatatttagtaatatttctgttccatcagtgtcaatatgattggaaactattgctacagtattgttattacaattgatagtggtaatgatatcttattatttgcatgggcaccagcattatttggtatattagatatcagtactatactagtagcaagacgtcttccacagaaaactaacatttctcttgttttcagttgctgtgatggggtatgttggggggaacatgtgggggctcatgtagttttcttcttgtaggattgctctgagcatttacaatactatcactactgtgaaccaaccagaaggctgaacaaaataacattcctctgatccacttgaccccagaacacattttttgttttggaagttggggtctcgctgtgttgcccaggctggcgtgcactcaggacacatttttcagagcccaagcatgtgtcagacaaatgccaaaaaaagatgcattgatggggttaggagctgccagcgcctggcgtgctggctgtgtggctctgggcaggtgactcagcctctctgagccactgttagcagatctgggaaacggggacacagcacattgtgcatgtgtgtgagtcagtggatagagtacatcaatgtgaagcatctccagtagttgcctctggctggtgatcacggtggtgaccacgtgacttccaaccctcacagcacagatggggaaatgaggctcaggggacgagagggccagggccaagggcaccctgatccacctttgctccttacccagaatgtccagccactcttctggggccggggctggggcgggctcgggctccatggcagcaaggaactctcgggccagggccccaggctgctcagcctcctccgccgggggttgtcccatgtcctccagcggtggcagctcactcaggtcatcctcttcctcctcttcctcctcctcttcctcctcaccctctgcatcctcaaccccatccagtacctcgaagtcctcgagcggtgggaccccggcgggcagtggggcagagggctcagagggttcagcacacgatgccatgctgctggggggacaggaattggccctggaagtggggggcagagatgtgggtcagaatcctacacagcccctcaaagtctccactgtactgattccccacactgccgatcactttctgtgtaactcaagggctccaggcctcagtttcctcatctatacagtgggtgtaacaacaaccccagcttgttgggagaaattaacccatgcatcaagcccttggcatcaggctcaaatagtgttagccattattagagctaattattatttaatgtttacaaatactccaggaagtagggaagattcccctcaacattttgcagaacaggaaacaggccagaggggcaaaggcatttgcccaaggtcacagagaaagccaaaggccaaaggaggatttgaacctggggcttcaggccctgtggctttgcctgattataagctgagcgaagggtgctgggatttttgtggagaggacagcctccgaggccttagggaagccatttttagagcctctaaggccactgggggaaattgaatcttttaccagggcctcccacctccagcctcttctccaaaggggagaccctccccaaaagcaccaactgtaatcacccagaaaccccaagcgttttttccttccacactctgaatctaacactatcccccacaaccccaacatcagggaccctggcccaaatccttccccaggagaccatcctcctctcatcaggcctcggtcccaccccctcaaagcagcctcctttccaggagtggtcgaggtcccaccacattctacagcctcttccttgccccagacctcctgaaccaataaccaacccctccgtcccccaggccccaagctcagaagagtgtggcacagccatcaaaccagcccgccgcatcccctccctaaccctcacctgcctgctcctcccgggctcggagccccactttgagagaccctcccagcccccacccccataattccccgcgcccgcacaattcggcctcccctcccaccccccaccccaaccaccaccgcccccagcacgggccagctccccccacagccgctccgtctcgccgtaaacactccagtgtccccagacgcccccccctttccgatcccataacaccccacgctctcctgacgccccacagccccggccgggccctcagtcaagccgcgacccaggcccccaacgacccacgcctgtctgacgccaccagtctggggcacccgacccccgcacgcctcgggcgcccctggccctgcacgcctccatcgggacccccccactggatcccctttgcccccagtgacccccatccctggccacccccgcccggccgcgccccctcgggcacccccgacccccgtgcccccccggctcgccacccccgcggcccctcgccccgcccatcggccgcagcccccggcgcgctagcccccggaccagcctaggccagggcagcggcccggccggcacggcgcccccagcaccccaggacacttgcctctggctccgggacccccacttggggtcctgcgcccccctccccgcccccagccgcggccgccgcgcctcgggaaccaggttcggccgcttggccccgcccctgccgtgcccattggccgccgctgccgcgactgccgcacccgttggctcatgcagacgtccgtcccgggcgttggcacctcccccttcctgcttggccccgcggggcgttcttaaagggaccgaagcctcccggctgctggggctggggcgggggctggggcgggggctggggcgggggctggggcgggggcgggggaccctgggctggaccccaacacgggtcagtatcgcgcagcctgtgcgactcctgcctctcctctgagcttcatcctgaccatctgcgaaatggggataaacacccccatctatgcactctcaccttgggggctgctgggggcacagtccactctaaatgttatttccttaaagagttcaagcttgacgggcagggcagctctggggttgctgaatgacccatcctgaagccttagttacagaagtgaacctgagggcctgaggaggagtgacgtgcccaaaggcatacagaaacctccctcccatcccccacacagtttaatgtctagaaggttgcctggtgcatactggaggcgctcgattactgctgcgcaggcgactgagccagcagggccactgggaggagttcctcctctatgcactgtctgctggagggtgataaggtccccatggctcgggaagaaggtggcatccttgattagctaagtttttgtggatcttgttttgaaaccgggacacttctccctccttcactcagttttatttccttcctagcagttactccttccagaattatcttgtcattattttgcttgtggttggagggaccatccctcactctgcttcatcctggcagagatttttacctgatttgtacccagcacctccttgaaccatgcctggcatctatagaagctcaataaatgggtaggtggatggatggatggatggatggatggatggatggatggatgagtcagacaccagcttttggaggtagctatcatggaggtggtaactggctttttggagatcacttctaaggttggagttcccaggttacctcctacaggaagccctcccaacctccccaaggcaagaccaggtgccccctttagctgtcttggcacaatgaagttgatgaacgtccacttcataactagtttacttgggttttttgtttgtttgtttgtttttgttttttgagaagaagtttcactcttgttgcccaagctggagtgcaatggcgcaatctcagctcaccgcaaccgctgcctcccaggttcaagcgattctcctgcctcagccttccaagtagctgggagtagaggcatgcaccaccatgcctggctaactttgtatttttagtagacacgggatttcttcatgttggtcaggctggtctcaaactcccgacctcacgtgatccgcccacctcgatgtaccaaagattacaggcatgagccatcgtgcctggccttttttttttttttctttctcttttttttttgagacagagtctctctctgtcgccaggctggagtgcagtggcgcgatctcggctcactgcaacatccacctcctaagttccaacgattctcctgcttcagcctcctgagtagctgggactacaggcacccgccaccatgcccagctaatttgtatatttttagtagagacagggtttcaccatgttggccaggatggtctggaactcctgacctcatgatctgcctgcctcggcttcccaaactagtttacttatatctctgcctttttttttttgagatagggtcttactttgaaacccaggctggagtgcagtggcacgatctcagatcactgcaaccatgtctatctcctgggctcacgcaatcctcctgcctcagcctcctgagtagctgggcccacaggtgcaccatcatgtccagctaatttttttttttttttttgagacagagtctcgctgtgtagcccaggctagagtgcagtggcgcaatctcggctcactgcaagctccgcctcccaggttcacaccattctcctgcctcagcctcccaagtagctgggactacaggcgcctgccaccatgcccgactaattttttgtatttttagtagagtcagcgtttcatcgtgttagccaggatagtctcgatctcctgaccttgtgatctgcccacctcggcctcccaaagtgctgaaattacaggcgtgagccatcgcgcccggcccaatgtttatattttttgtagagatggggtttccccatgttgcccaggctggtctcgaactcctgggctcaagcaatcctcccactttggcctcccaaactgttgggattataggcgtgagccactgctttgatttacctctgccttgccctctacactggcagagccccaaagtctgggaaggctttgttctttctcattgttatagctctgaggcttgcacagtgcctgccacaaaaggtagtggtggggtctcacggaaatcactgaggaaggaagggaggttaaaggtggtagcatagcagagctatgtaagaaatcacctggagggctgggtgcggtggcttatgccagtaatcccagcactttgggaggccgaggtgggtggatcacctgaggtcaggaaatctagaccagcctggccaacatggtgaaaccccgtctctactaaaaatacaaaaattagccgggtatggtggtgcatgcctgtaatctcagatactggggtggctgaggcatgaggactgcttgaaccccaggggtggaagttgcagtgagcaagacccagtctcaaaaacagcctttgggaggctgaggcagatggttcacctgaagtcaagagttcgagaccagcctggccaacatggtgaaacctgtctctgcgaaaaatacagaaattagccgggtgcggtggcacatgcctgtaatcccagctacttgggaggttgaggcaggagaatcgcttgaacccgggaggcagatgttgcagcgagccaagatcacgtcaccgtactccagcctgggcaacctaagcctgggtaacgtagtgagagcctgcctctacagaatattaattaattaatttggagacacagtctccctctgtctcccacgtagagtgcagtggaacgatctgggctcactgcaacctctgactcccaggttcaagcgattctcctgcctcagcctcctaagtagctgggattacaggcgcctgccatgacacatgactaattttttttttgagacagagtctagtgaggctggagtgcaatggtgtgatctcggctcactgcaacctctgcctcccaggttgaagcaattctcctgcctcagccttcctagtagctgggattacaggcgcctgccaccatgcctgcctaattttttgtatttttagtagagatgggggggttccgctatgttggccaggctggtcttgaacttctgaccttgtgatccacctgccttggcctcccaaagtgctgggattacaggcatgagccgtcacacctggcctctacagaaaatttaaaaatgtagtcccagctaaatgggaggctgaggtgggagggatcccttgaacccaggaggtcgaggctacagtgagttatgatcaaagttctgcactgcagcctgagcaacaaggcaagacgctgtttctaaaataatagtaataattattattataaattaataagctactaaaataaactataaaataacaccaccaacaataataataatggctggcactcattgaacagatatttgcaggcaaacattttacttatatttgcttttcccttttttttttttttgggacagaatctcgctctgtcgcccaggccggagtgcagtggcacgatctcggctcactgccacctctgcctcccaagttcaagcaattctcctgtctcagcctctggagtagctgggactacaggcaccagccaccaagcctggctaatttttgcatttctcgtggagacggggtttcactgtattggtcaggctggtctcaaactcttgacctcgatctcaaaaacaaaacaaaacaaaacaaaaacaaaaaaacaagactgctctacttggaggccatatcattggctgcatgtagagttgcaattgtgtttcctggtgaactgaacctttttttttttgagatggagtctcaatctgtcgcctaggctggagtgcagtggcaagatctcagatcactgcagcctctgccccttgggttcaagtgattctcctgcctcaccctcccgagtagctgggattacaggcacccgccaccacgcttggctaatttttgtatttttagttgagacggggtttcgccatgttggccagggtgttctcaaactcctgatctcatgtgatccacctgcctcggcctctcaaagtgctgggattgcaggcatgagccagagcgccaggcccgatctgaacctttcattgttaagatgtgcccctctttacttctttcatttttcccttagagtgcactttgttaagattgcacaccaagcttgggcatggtggctcactcctgtaatcccagcactttgggaggccgaggcgggctgatcacgaggtgaagagatcgagaccatcctggccaacatggtgaaaccccgtctgtactaaaaacagaaaaattagctgggcatggtggcacactccagtaatcccagctactcaggaggctgaggcaggagaattgcttgaactcgggaggcggaggttgcagtgagccaagattgcgccacttcactctagcctggagacagagctagactccatctcaaaaacaaaaaagaaaaaaaaattacacaccaattctccttggttcatgttttctttctttctttctgacacaaggtctcactgtgtggcccaggctggagtgcagtggcacaatcatgagtcactgcagcctcaatcacccacgctcaagcaatcctcccagctcagcctctccagtagcttcaactacaggtgtgcaccaccatgcccagctactttttttatatttattgtttgtagagatggagtcttgctacattgctcaggctgttctcaaactcctgggctcaagcaatcctctcacctcggccttgcaaagtgctgggattataggcatgagccattgcgcccgggtccatctttgttttttaactggggaatttggtctattggtatttaatgtaattatggacatatctagacataaatctgtctcattaggtggttttcctcttttttttttttttttgagatggagtcgctctgttgctaggctggagcagtgatcacgccattgcacttcagtacaggcaacagagtaagaccctatcacacacacaaaaaaggaaatgaaatggaaaaaagtggcagagaaagccttccagtccccaaacccgacccccgaaagtccccatctctgggcagactgaatgttcgcataactttctatcctctcccttcatcatacaaaaaaacatgttcttatctcaagtccagtgtatacaaaacatcaggggccagccaagtcccttttggcctcaatctatagtccccaccccttctaagaccctcgtaaatgttccttggcttccaaaagagccccaaggacccactgaaaagtttgattttggcttggcactgtggctcatatctgtaatcccagcaatttgggaagccaaggcgggtggatcacttgaggtcaggagttcgagaccagcctggccaatatggcgaaaccctgtctttaccaatacaaaaattatctggacatagtggtgcatgcctgtaatcccagctactcaagagggtagggcaggaaaatcacctgaatctgggaggccgaggttgcagtgagccaagattgcaatactacactccagtctcagtgacagagcaagacctggtctcaaaaaaaaaaacaaaaaacaaaaaaaaacaaacaaacccgggcgcagtgctcatgcctgtaatcccagcactttgggaggctgaggcgggaggatcacaaggtcaggagattgagaccatcctggccaacatggtgaaacccctctctagtaaaaatacaaaaattagccgggtatagtggcatgtgcctgtaatcccagctcctcaggaggctgaggcaggagagtcacctgaacctgggagacggaggttgtagtgagctgagattgtgccactgcactcctgcctggatgacagagtgagactctgtctcaaaaaacaaacaaacaaactgttgaactaaatatacaagaattctagtcaggcgcggtggctcacgcctgtaatcccagcactttgggaggccgaggcaggtgaatcacaagatcaggagttcgagaccagcctgaccaacatggtgaaacctggtctctactaaaaatacaaaaattagatgggcgtggtggcacacacctgtaatcccagctacttgggaggctgagccaggagaatcgcttgaacccgggaggcagaggttgcagtgagccgagatcgcaccactgcactccagcctgggcgacagagtgagattccatctcaaaaaaaaaaaaaaaaaaaaaagaattctagccaggtacagtagctcacacctgtaatcccagcactttgggaggccaaagcgggcggatcacctgaggtcaggagtttgagaccagcctggccaacatggtaaaaccctgtttctagtaaaaatacaaaaattatccaggtgtggtggtgggtgcctataatcccagcttctggggacgctgagacaggagaatcacttgaacccagaaggtggaggttgcagtgtgctgagatcgcaccactgcactccagcctgggtgacaaagtgagactctgtctcaaattaaaaagcaacagcctggccgggcgcggtggctcacgcctgtaatcccagcactttgggaggccgaggcgggcggatcacgaggtcaggagatcgagaccatcccggctaaaaaacggtgaaaccccgtctctactaaaaatacaaaaaattagccgggcgtagtggcgggcgcctgtagtcccagctacttgggaggctgaggcaggagaatggcgtgaacccgggaggcggagcttgcagtgagccgagatcgcgccactgcactccagcctgggcgacagagcgagactccgtctcaaaaaaaaaaaaaaaaaaaaaaaaaaagcaacagcctgggcgtggtagctcacacctgtaatcccagcactttgggaagccaaggaggggtggatcacgaggtcaggagttggagaccaagctggccaacatggtgagaccctgtctctactaaaaatacaaaaattagctgggtatggtggtgcacacctgtaatcccagctactcgggaggctgaggcaggagaatggcttgaatacgggaggcagaggttgcagtgagctgagatcacgccactgtactccagcctgggcaacagagtgaggctcagtctcaaaaaaaaaaaaaaaaaaaaaaccgccaccaacaacaaaaaccaattgttgaactaaatatataagaattcctgccgggtgtgatggctcatgcctgtaatcccagcactttgggaggccgaggcgggctgatcacaaggttaggagatcgagaccatcctgtgaatggtgaaaccccgtctctactaaaaatacaaaaaaaaaaaaaattagctgggtgtggtggcaggcacctgtggtccttgctactccggaggctgaggcgggagaatgctgtgaacccaggaggcagagcttgcagtgagctgaaattgcgccactgcactccagcctgagcgacagagcgagactctgtctcaaaaaaaaaaaaaggattccagtcctcattgacttcttttttttttttttctgagacagggtctccctctgttaccgagcctggagtacagtggtgaaatcctagcttactgcagcctggaacttctgggatcaagtaattcttccacttcagcctcccaagcacctgggactacagatgtgcaccaccacgcccagttaatttttaaaattttttttagaaacaaggtctcaatgtttcccaggctggcctcaaactcttgggctgaatggatcctccagcctctgcctcccagtcactgactttcccatgaatgacggcagcagaacctgggagcgatattatcaacagtttactgagggcttactgtgtaccaagtcttgttgtaaggattttgcctacgtgatttcatagagttaagccgcttgcccagggccattcagctaggatttaaaactcagatatgtgtaattccagggctctgaaacagtcttcatgtgcccaagaacttgtgtgtttatcttccaagctctcaacaaccttcagagatagatgttgtgattacacagactcgcaattaacagagactcagagaagttacaaatataatttataacatacacaccgtatagaatctcaatagctaacagtaattacttgtaaacattaattttatttttttaaacctaatgacacacttctgaaaagcaaacatgtatggagcaattactattcaccttgttttgttcatacatttaacttggattatctcactttaaaaaaggcatcctagtggccgggagtggtggctcacgcctgtaatcccgcactttgggaggctgaggccggcagatcacctgaggttgggagttcgagaccagcctagccaacaaggagaaaccccatctctactaaaaatacaaaattagtagggtgtggtggcacatgcctataatcccagctactcgggaggctgaggcaggagaatcccttgaactcagggggcagagattacggtgagctaagataacgccatcatactccagcctgggcaacaagagcgaaactctgtctcaaaaaaaaaaaaagaaaaaaaaaaaggcatcctaggtagggcgcggtggctcatgcttgtaatcccagcactttgggaggtcgaggtaggcggatcacctgaggtcgggagtttgagaccagcctgaccaaatggagaaaccccatctctactaaaaatacaaaattagccggatgtggtggcgcatgcctgtaatcccagctactcgagaggctgagggaggagaatcgcttgaacctgggaggcagaggttccaatgagccgtgatcctgccattgcactccagcatgggcaacaagagtgaaactccacctcaaaaaaaaaaaaaaaaaaagcatccttggccgggcgcggtggctcactcctgtaatcctagcactttgggaggccgaggcaggcagatcatgatgtcaggactttgagactagcctgggcaacatagtgaaaccccgtctctactaaaaatacaaaaaattagccgggcatggtggtgggcgcctataatcccagctactcaggaggctgaggcaggagaattgcttgaacctgggaggcagggttgcagtgagccgagatggcgccattgcactccagcccaggcaacaacagcgagactctgtctcaaaaaaagaaaaggcatcctcatctccgtatgaattcatggtttgtatttattttttattttttgagacagggtcttgctctgttgcctgactggagtgcagaggtgcaatcacggctcactgcagcctccacctttgggactcgggtgatctcacctcggcctcctgagtagctgggactacaggcatgcgccaccacgcccagctaatgtttttgtttttgtttttgttgttgttttgagacagagtctcactttgtcacccaggctggagtgcaatggcgcgatctcagctcactgcaaactccgcctcctgggttcaagtgattctcctgcccagccttgtgtgtagctgggattgcaggcacgtaccaccatgcctggctaatttttgtatttttagtagagacgaggtttcaccatgttggccaggctggtctcaaacccctgacctcatgatccacctgcctcggcctcccaaagtcctgggattacaggcttgagccactgcacctggccactgagccaccgcgcctggccacttgttttgttttttgagacagagtctcactctatcacccagctggagtgcaacggcacgatctcggctcaccgcaacctcagccacctgggttcaagcgattctcttgcctcagccttccaagtagttgggataacaggcatgcgccacctcgcccagctaatttttgtgtttttagtagagacagggtttcgtcatgttggccaggctggtctcaaactcctgaccccaggtgatctgcccccctcagcctcccaaaatgctaggattacaggagtgcacctggccatgtttgtattttttgtagagacagacttttgccatgttgcccaggctggtctcaaactcctgagttcaactgatctgcccgcctcggcctcccaaagtgctaggattacaggcatgaaccactgcacccagcttcatgatttgtatttatttggagaatgggtctctgtcacccaggctggagtgcagtggcttgatcacagctcactgcagcctcaaactcctgggtttaagtgatcctcccacctcatccttctgagtagctgagattacaggtttgtgccaccacgcctggcttattgtttagctgtgcctgctgacgggtacctctagaagcagtgacaccccagcagcaatgagcacacacagcacccagatcttagtttaattttttttttttgaagacagagtctcactctgtcccgcaggccggagtgcagtggcgcaatctcagctcattgcaacctctgcctccctggttcaagccattctcctgcctcagcctccctagtaactgggattacaggcacacgctgccacacccggctaactttttgtgttttagtagagacagggtttcactgtgttgcccaggctggtcacgaactcctgagctcaggcaatctgcctgccttggcttcccaaagtgttaggattacaggcatgagccaccgtgcccggccttttttttttttttttttttttgagatggagtcttgctctgttgcccaggctggagtgcagtggcgtgttcttggctcactgcaacctctgtctcctgggttcaagcaattctcctgcctcaggctcccgagtagctaggactacaggtgtgcaccacaatgcccagctaattgtgtgtgtgtggtgtgtgtgtgtgtgtgtgtgtgtgttttagtagggacggggtttcaccatgctggccaggctggtctcaaactccttacctcaggtaatctgcccgcctcggcctcccagaatgccgggattacaggcatgagccacagcacccggctaatttctttctttctttcccttctttccctccctccctcccttcctttctttccttctttcttttttttttttttttttgagatggagtttcgctcttgttgcccaggctggagtgcagtggtgtgatctcggatcactgcaacctctgtctcccaggttcaaacgattctcctgcctcagcctcccaagtagctaggattacagggatgtgccaccatgcctggctaattttgtatttttagtaaagacagggttactccatgttggtcaggctggtctcgaactcccgacctcaggtgatctgcccacctcagcctcccaaagtgctgggattacaggagtgagccactacacccggcctctttcttttttgttttgagacagagtttcgctcttgttgcccaggctggagtgcagtgggtgatctcagctcactgcaacctctgcctcccagttccaagtgattctccagtgtctcgagtaactgggattacaggtgcccaccaccatgcctggctaatttttttgtgtttttaatagagatgggggggtttcatcatgttggcccaggtggtctcgaactcctgacttcctgatctgcccacctcagcttcccacagtgctgggattacaggcgtgaatcactgagccccgactgatcttggtttctaaatcctactcttgaagcaaaggaaccaggttccttggagaaatggctgattccagggattttacacagcattggatcatgttgtggagcccaagataaataatgctcagagaatggtggcgacatattaaaaggacacaggagcttatttattatttatttatttatttattgagacggagtcttgctctgtcgcccaggctggagtgcagtggctcgatctctgctcactgcaagcttcgcctcccgggtttgcaccattctcctgcctcagcctcccgagtagctaggaccacaggcacctgccaccacgcctggctaattttttgtatttttagtagagatagggtttcaccatgttagccaggatggtctcaatctcctgacctcatgatccgcccgcctcggcctcccaaagtgctgggattacaggcgtgagccactgcacccagccaggagctaatttaaaggggcaggaaaggaaataattataattataatgatgtggatttattaatccacatcagtttatagcgatttttgttgttgttgttgttgttgctttttgagacaaagtctcattctgtcacccaggctggagtgcagtggcacaatctcggctcactgcaatctccgcctcccaggttcaagagattctcatgcctcatcctcctgagtagctatgattatagcacctgccaccacgccaggctaattttttttttttttttttggatttttagtagagacggggtttcaccatgttggccagtctggtctcaaactcccgacctcaggtgatccacacgcctggcatcccaaagtgctggggttacaggcgtgagccactgcgccgggcctgtttgttttttgagactgggtctcactctgttgcccaggctggagtggggtcttcgttcactgcaacttctgcctcctggcctcaaacgatactcctacctcagcctcttgagaaactgggaccacaggctcgggccacaggcccgtttttttttttttttccaattgtagctgtgaggcattttattacaaaaacttggtactcgtatacacaaactaacatgaacttaaaatacattttcttcattttttagcttgaccttcttttttttttttgagacgtggtcttgctctatcgcccaagctggagtgcagtggtgcgatcttggcttactgcagcctctgcctcctgggttcaagcgattctcctgcctcagcctcctgagtagctgggattacaggctcccgccaccactcccgactaattttttttatttttagtagagacaaggtttcaccatgttggtcaggctggtctcgaactcctgatctcgtgatccgcccgcctcggcctcccaaagtgctcggattacaatgacaggatgtgagccaccgcgcccagcctgtaaacccttttgaaaaaattccccagcgcattactccaaaacaacgtggaagtgtaaatggaaaccagggctgggcgcggtggctcatgcctgtaatcccagcactttgggaggccgaggcgggcagatcacctgaggtcgggagatcgggacccgcctgaccaacatggagaaaccctgtctctactaaaaacacaaaacttgccgggcatggtggcacatgcctgtaattccagctactccggaaggctgaggcagatgaatcgcttgaacctgggaagcggaggttgcggtgagccgagatcacgccattgtactccagcctgggcaacaagagcgaaactctgtctcaaaaaaaaaaaaaaaaaaaaaaaaaggaaacttggaccaaaaaaatcagcaaaagtggagcagggatgtctgaacacagatgagtctaattccctgcttggaaagcaggacacctgagtgtggtttggcctctgaccactgtagcatttacgaccttggggagggttaccactctgggacctcagtcacactatctacaaaatgggacacttctctcagccttccttcttccgggccgctttcaagcctgggcttctggaaatacgcaggcgcgagatgaattgtttgattggctattcattgtgatgcacccacgagctgaagctccgtctaagccccgccctttcctgtcgtgacttaacgcacgcaagcggctccagggtacgtccccgccacgcgcgctcgcaggatcggtgcgtggtgacgtttcgccggcgcgggcgccatcccggaagcgcgagcaaggccgccagatgtgcaggtgccgccgctaccgacgccggggccgagtttggggtggggctggggactccagggccgcggggaaccggtccgggtcgggcgcggcccccgggctgcggtggggtggggtgcgccactggccacatctggtcattcctgctgcgcacaggcctcagtttccccgtctgctcaatggatacgcaggcggcgctacgggctggatctggatccggatcaggggcataggaattggggcctcctgtgttctgggtgtgtcgtgtaacctggagctgggcgttgcccggtttgtgcctcagtttccctgtattgtaggggacggggcgtgaggggatatttgagcccctccccacttggggtttttcagagcttggatggctgagttaaattctgttaaataacctggatatagaaccgtggtgcttctctgcctctccctgtgagtttcggcaacggagcccgcccctgtgagcctcagtttcactcggagatgattgtgtctgcctcgtaacggtgattgaggatgaaatgaagtgctctacaagtgtttgcccgtaatatattcttagaggcccctgggatgctctcaaaatgttgattcccgggacttcttcacactcctcttggagaaacagcctgtcctgagctccagtcgttatcacctttggtttcagttgccacagacagcactgtgagatcttcattctaccttattttcattttatggttgaaaaaactgattcagaagggtgaagtggctctcccatggtcaaacagcctacctctctgcgtttcttcaataaatctacatttggagttgggatcagagctcttgctgggtcaatttcactgtgtatgtgggccagactagcagtaatcagggaaggcttcttgggagaggaagttgcggggggacgggagggaggtgccaggaacccctcagccctcacatctgggagccagagacagaaaagagtcctgttttgaaggaggagtgtatcccagaaggtcccagtactgtgtctcactggtactagctatgggcctccctctccaggtgtctttttttttttttttttttttttttcagttgagatgaagtctccctctgtagcccacactagaatgcagtggcttgattttggctcattgcaacctctgcctcccgggttcaagcgattctcctgcctcagcctcctgagtagctgggactacaggtgcccgccatcatgcctggctaatttttgtatttttagtagagacgggggtttcaccatgttcaccaggctagtcttgaactcatgacctcaggtgatccaccagccttggcttcccaaagtgctgagattacaggcatgagcacccggtccaggtatcctctttatacaagatcatgcttctttgggaatgtggagactgggtgtctctgcatggcatgtcataggagttcaataaccatagttattattagagggaagggggttttgctgggtgtggcaccttatttctagaaggtgctgcaaaccactgaccagatacagatcacaaatagatgctcttggcctccatgatatcttggaaaaaagtattgattgctgacatttgtcaatgaggcaatttcccagaaaaaaaaaatccctgtttcctttttcctggagaaacatcagaagtcaggcagaaatcagctgctgtaagaagccactgtcctgtcacagctggatattgtgcacctgttcagattcacacctttgtgagacccgtgggctgtggccgtttgttgtgacttaggttcactggctgtgtgacagtggcccagtttctcagtgtccctgagcctcagttttctcatctataaataagaatgataacagtatgtatgagcttgatgctttgtttagcatagagtagctgctgaataaatgggagagtacattaagtgagctctgaaaccctttctttctctttcctttctttctctctttctctgtctctctctctttctctcctctctctttctctctttgtctctctctctttctctccttctctctctctttctctctctcccttccttccttccctccctccctcccttccttccttcttttcgagatggagtctcactctgtcgcccgggctggagtgtagtggcatgatctcggctcattgcaacctctgcctcccaggttcaagccattctcctgcctcagccatccaagtagctgcgactacaggtgcccgccaccatgcccggctaattttttttgtatttttagtagagactgagtttcactatgttggccaggctggttttgaactcctgacctcaagcagtctgcccacctcggcctcccaaagtgctaggattacagacgtgagccaccacacccggcctctgaaaccctttctgatccagtagaagttcgtctctgtttcttggctattaaatgtgtgggcctcagagccaaactatatcaagatcctagatttttcctgaactccctaggagggtcagtgctgtagcccctcctaccctggctgctccgggaagtccctgcctgccattacggtcatctgtgtgccagcaaaactgggaacctcagaaccatctggattgctggggcccacaggttggctgtgagtacctgcaattcttggctttaatttgctaataaaagtgtcacgtcagagctgagtttgaaaagttctgttgcccttccccacaacaacattctggcagccccttgctatgagccagactccgggtcgggttctggtgacagacacacctctactccttcttttttttttttgagacggagtctctctgttgcccaggctggagtgcagtggcacagtcttggctcaccacaacctccgcctcctgggttcaagtgattctcctgcctcaagctcccgagtagctgggactaaaggtgcccaccaccatgcctggctaatttttgtatttttagtagagatggggtttcactatgttggccaggctggtctcgaactcctgacctcgtgatccacctgcctcgccctcccagagtgctaggattacaggcgtgagccacagcacctggccacctctgctcttttggagctgacgttgtggcggtgacaggcaaacgggttagctgataactaggataatttcatgaagaggtgaaccagtgaagcagttaaatcaaggtaaagggtggctgggcgcagtggctcaggcctgtaatcctagcactttgggaggccaaggcaaaagggtcgtgtcagcctaggaatttaagagcagcctaggcaacatagcgagaccctgtctcttaacaaacaaacaaacaaaaacaaggtaaagtagcctgggcgcggtggctcatgcctgtaatcccagcactttgggaggctgaggcgagtggatcacctgaggtcagtagttcgagaccagcctggccaaaatggtgaaaccccgtctctactaaaaaatacaaaaattagccaggcgtggtggcgggcacctgtaatcccagctacttgggagggtgaggcaggagaatcgcttgaacctgggaggcggaggttgcgctaagccaagatcgcgccattgcactccagcctgggtgacaggagtgaaactctgtatcaaaaagaaataaaaaaacgaggtcaagtagtaagagaagcggtaagagtgacgggaacaggagtcattgacctcttgggagaggagacattggaggtggtgatgatttgctgaagcagccacacacgttcagcttgtgaggacagcagttgttaggcaggggatgagggaggaagctggcagatctgtgcaggtgagaggtacctgtggccttgggctcatggaagtgggaggtgatgggattctaatgtgcttgggtacagtttacaaatacaacctctcttagtttgcccaatacctccaaattcctggggtggcacacctgaggttcaggtggcatgactgagccacagtcacacatccccactgtaggataccaccacggttgggttaggttccagcacatggcggtcccggcctggcctcttggtcccacctcacctggtgactagtgcagaccactctgttcttgcctgtttcaggcagcggaggaggagaaagagatggacctcccggactcggcctcgagggtcttctgcggccgcatcctgagcatggtgaacacagatgatgtcaacgccatcatcctggcccagaagaacatgtgagtggcggctgggggacctgagcgtgggaaggaatccacaggctggccaacattcttgtcttgcccgcccctacccggggcccacactggtgataaaatgaaggaaatgagcaaatctgtcgctggctccaaagtaaattccttcccggcctggaggcgaggccttggcacaggaagcagggctttggggagattttgcagctgcggatggcttggcgggggccgcaggggctcctgtcccgagacctggggtgggagagttgaaggaccagagggggccacatgcaggtttttttgtttatttgtttcttgtttttgagacagagttttgctcttgttgcccaggctagagtgcaatggtgtgaccttgcctcactgcaacctccgcctcccgagttcaagcgatttctcctgcctcagccctctgagtagctgggattacaagcatgtgccaccatgcccagctaatttttgtatttttagtagagacgggctttcatcatgttggtcaggctggtctcgaactcctgacctcaagtgatccacccgcctcggcctcccgaagtcctgggattataggcctgagccactgtgcctggcctttatgcaggttttatgctggtgcgcctacttcctggtgaaggactagtctcccagagcccaggctgtgtctgcacagtgcccagggtctcttggagcggacataaaggcctcttgtcctcactggggtttggtgctgtggctgctgaaaccttgccctaattcaggcctgccctgtggggaagaaaggctaataccaagcttgtccaaccctcggcctgtccaaccctttgaatgtgggccaacacaaattcgtaaactttcttaaaacattacgagattttttttgtgatttttttctttttctttcttaactcatcagctgtcgttagtgttagtgtattttatgtgtggcccaagacaattcttcttccaatgtggcccagggaaatgaaaagactggacaccactgggctaatacagtcttggagtggaagcacagcctcccgcagctttgtttttgtgtctctgagccagaggctcttctcagctgtcacgacacagtacagacctgatttccttaccttttctcccagacccagagcagctccgagtctcaatagtacctgtctctctcctgtgtcttttttttttttttttttgggagacagagtctcactctgtcgcccaggctggaatgcaatagcataattgctgctcactacatcctctgcctcctgggtcaagtgattctcctgcttcagcctcctgagtcgctgggattataggcatgcaccaccatgcctggctgattttttttttgtgacggagtctcgctctctcgccaggctggagcacagtggcgcaatctcagctcactgcaacctctgcctgctgggttcaagcgattctactgcctcagccttccaagtagctgggactacaggtgtgcgccaccacggccagctaatttttgtatttttagtagagacggggtttcaccacgttgaccagaatggtctcaatctcttgacttcgtgatccgcccgcctcagcctcccaaagtgctgggattacaggtgtgagccaccgtgcccggccctgatttttttatttttagaagagatgtggtttcaccatgttggccagacctcaagtgatccaccctgcctcaacctcctaaagtgctggtctccttttttttgagacatagtttcgcactgtcacccaggctggagtgcagtggcgcaatctcaggtcactgctatgtccgcctcccgggttcaaatgattctcctgcctcagcctcccgagtagctgggattacaggcgcccgccaccatgcccagccaatttttgtatttttggtagagacgcggttttcccatgttggcaaggctggtctcgaactcctgacctcatgatctgcctgccttgacctcccaaagcgctggaattgcaggcatgagcccccatgcccggctggtctcctgtttttttaggtcagattcagacctggctctgggaaacttctagactgaggggagacaaagccagacacagaccctcctggccctatggtgtcagggctgggccagaggaacaacctggggctagtggaattaaaagagtctgattgggccaggcacgatggctcactcctgtaatcccagcactttgggaggccgaggtgggtggatcacgaggtcaggagatcgagaccatcctggctaacctggtgaaacctcgtctctactaaaaatacaaaaaattagccaggcatggtggcggacgcctgtagtcccagctatactcgggaggctgaggcaggagaatggtatgaacctgggagacggagcttgcagtgagccgagatcgcgccactgcactccagcctgggtgacgaagcaagactctgtctcaaaaaaagtctgactgaatagaggtagacaaggctacatgagaaggacacacttgagtagggttttgaaggttgaataggagtttgctaggtggctcaaagagtaggtagaactctgcaggacaagggaacagcccatgcaaaggttgtgaagcaggcaagggcttggcatgaacagtcttctgggccaggttgggcagggccctgaagctgggcagtgaagctcatgccctctctccaccatcaggctggaccgctttgagaagaccaatgagatgctgctcaacttcaacaacctgtccagtgcccgcctgcagcagatgagcgaacgcttcctgcaccacacgaggaccctagtagagatgaaacgggacctggacagcatcttccgccgtatcaggtgggtgctcagtgccaccccagcccagctgacctctgcctccacctccccatctgagcctcagtttccttcacataccagggtaaagggagatttctgtttgttttacaaggcttcactgcgcacttaagtgtctgggacaattccaaccctgggataaaatcttgacgtaagtttatttactgattgattaattgatcgagacagagttttttttttttttttggagacggagtctcgctctgttgcccaggctggagtgcagtggcgcgacctcagctcactgcaagctccgcttcccgggctcacgccattctcctgcctcagtctccggagtagctgggattacaggtgcctaccaccacgcctggagaattttttgtatttttagtggagatggggtttcaccgtgttagtagtcaggatggtctcgatctcctgacctcgtgatccagccgccttggcctcccaaagtgctgggattacaggcgtgagccactgcgcccggccgagacagagtcttgatctgtggccctggctggagtgcagtggcgtgatcttggctcactgcaacctctgcctcctggattcaagcgattcttgtgcttcagccttctgagtagctgggtctacagacatactgtaccacacccagctaatttttgttgttgttgttttatttttgaggtggagtcttgctctgtcgcccaggctggagtgcagtggtgcaatgtcagctcactgcaacctccgcctcccaggttcaagcgattctcctgcttcagcctcctgagtagctgggactacaggcgcatgctgccacgcccagctgattttttgtattttagtagagacgagatttcaccgtgttgcccaggctagtctcaaactcctgagctccagcactctgcctgcctcggcctcctaaagtgttgggattacaggtgtgagcctaatttttgtattttgtgtaatttttgtatttttttagtagagacagggtttccccatgttggccaggctcatctcgaagtcctggcctcagatgatccatccacctcgacctcccaaagtgctgggattataggcatgagccatcatgcccagccttgcagtttatttattcttaaaaaatgtaacacagtgcggctgggcgaggtggcccatgcctgtaatcccagcactttgggaggccgaggcaggcggatcacgaggtcaggagatcaagaccatcccggctaacatggtgaaaccccgtctctactaaaaatacaaaaaatactaaaaatacaaaaaattagctgggcgtggtggtgggcgtctgtattgccagctactcgggaggctgaggcaggagaatggcatgaacccaggaggtgagccgagatcgcgccactgcactcaagcctgggcgacagagcgagactccgtctcaaaaaaaaaaaaaaagtaacatagtgctagacacataatgaaaaggcaggaatggctgggcacagtggctcatgcctgtaatcccagcagttagggaggctgacgcaggcagatcacctgaggtcagaagtttgagaccagcctggccaacatgatgaaatcccgtctctactaaaaatacaaaaaaatcagctgagcatggtggcacgtgcctgtaatcccagctacttgggaggctgagggaggacaatcatgtgaatccggaaggtggaggttgcagtgagccaggatggcaccactgcactccaccctgggcgacagagtgagattctgtctcaaaaaaaaaaaaaaaatttatcagagaagaggccacatgtaagaagcagcctcgcagggggagcccccagccagtgcctaggctcagagcacccagagtctaactagttgggggttggtgcctaccttggggctggaggccggctggtgggcgactgtcagggccgtggctgctgggccgagcacctagagagagtgaagatgtgaggtgatgaacagtgtgggggttctcactcccgtctccccttgccctcagctggcagcaggggcttgtggccagcaccaggcccagcctacctgctcagcaggttaagccctgtgtgccttctctcccctgcaggacgctgaaagggaaactggccaggcagcacccagaggccttcagccgtaagtgtcacgcagggttcctgctcccgagcacgtcagcactctccacccagggcaggcttctggaaggccaccttggggcctgatactgagaccaggctgtaatgggcagtgggtctggggaaacctggggtgggggcagggtcagggtgctggcctggtcctgtcagcagctggcagagtgggcactaggacgggagtccgtgccccgtggggaggccgcacaggagaatgtggataagcagcatgacaatccttatccctgtgtgcattatgagccatctcagaacagagcacgggctcatgtgacaccagccccgacatcgtctcgccttccctgagccccagcttcgaggatctgtcccatgtccagctgttacccacagtcacccatggggtggggactgtgagtatcaccgtttcatggagagggaaacagaggcccagaggggcaggacttgagttcgcatctgtctggctagagagctcgcgtgttctctggggtaccattccatgttgccaccaccttaaagggctctgcaggctgagcctgggttcacaccatctgttgaaaaggccgacagctctccatcccagggcctccaacagcagtttacagagcagggagctgggctgaggggaggtcatatacctagcccaggtagtgcagtgagccaggttcgccctcagggctcctgtaggcctaaccccagatcttgtgtcccttcctcacctcaccttgaagggagggctcttccctgcctgggcctcagttttctcctctacaaaataaaaatgggccaagtctgccaggcgcggtggctcatgcctgtaatcccaacactttgggaggctgaggcgggtggatcacctgaggtcgggagttcgataccagcctgaccaacatagagaaaccccgtctctagtaaaaatacaaaattagatgggcgtgatgatgggcatctgtagtctcagctactcaggaggttaaggcagaagaatcgcttgaacccgggagacggaggttgcagtgagccgagattataccattgcactctagcctgggcaaagagcgaaactccgtctcaaaaaaaaaaaaaaaaaagggtcaagtcatacccccatggggtgagggcagccgttaggggtcacatggacaataagtcctacatcacagagcttggcaaggtgacaaaaccaactcttgggcctccttcccccagatatcccagaggcatccttcctggaggaagaggatgaagaccccatcccacccagcaccacgaccaccattgccacctcagaacagagcacgggctcatgtgacaccagccccgacaccgtctcgccctccctgagccccggcttcgaggacctgtcccatgtccagcctggctccccagccatcaacggccgcagccagacagatgacgaggagatgacgggcgaatagccctgctgcccggtgccttgagggggtctcagggcagcagcatacaaggtggcagcgggtaaccctgccttgttctgtcatccagggctcctttgctgccccgttctgtcacccagggctcctagggggacaaggctctctcccgaggggtgtggaattcctgggggggtctttaattctggctccttccttcctcagaacatctctattctgcaagacccctctgccatgccagggcacgcccattccagctggagtcgtggggctgggcacaggggaatttttccagagctgagcctgacgtctgctctgaagaatgcttagaaggttcccagacaccagagccagatgtcccccaccaccggtcaggacctccttgaggtgcacaagcacggtctcctctgagttcaccccagcccacccccgcacccactaattctgcttttcctgccccttgctccgtaaaagtatcaaatactttctccttggtatctcaaggaggtttctgagataggtagaagtcttgagacggaggctggccatccattcagccctgagcgtgctgagttctgtgtttctctgaatagaggtgtggaacctgaggggccagcaggcctctctgaaggcctccatggagcaaacggagccacctcgggaaagagtttaatggaatatttttgtacccgatgtttacagatgctgttgggaagttatcaataaaaagacaccattactaaaaagggaaaagtacacctagctgtggcttcttcagtccttaagccaagcaacccaaaaggagggcaagtgctggatgtggggctgggggccctgctggagggaggtgcagacaatcaggcactacagggctagaaagagatgtggcccttttttggaaccccccctggtgggagctataacaacccaagttcccgtcaccagctaggtcttccctcacgctgctgtcactgctcacaatactagtgttcccatcctcatttcataattccttctccagatctcagccttcctccagataggggagccacactagatccattccccatcagacacactcccagggttacctcatcttctgagtacttagaaattatgttgttatgaccgggcttggtggctcatgcctgtaatcccagcactttgggaggccgaggtgggtggatcacctgaggtcaggagttcgagaccagcctggccaacatggtgaaaccccatctctaccaaaaatataaaaattagctgggtgtggtggtgtacacctgtaatcccagctacttgggaggctgaggcagaattgcttgaatccaggaggcagaggttgcagtgagccaagatcgcaccactgcactctagcctgggcaaaaagaccaaaactgttgtctcaaaaaagaaaaggaaattaggttcttaaaggcatcttcccagacgtgagagtgtctgcttttgcctggtatagtagtgcctgcaaatgttcaaggaaataaacaggtacccctgttaagcctataggtaacttctcattgctccccatcttctctgtactcagcactttttttttttgttttgtttttgagacagcacctctctgttgcccaggctggagtgcagtggctgaatcatgggtcactgcaatctcaaacctatgggttcaggcaatcctcctgcctccgaagtagctgggactgcaggtgcgcaccaccacacctggatagttcaaaataaaacttttttttgtagagacagggtctcactatgtcttccaggctggtcgtgaattcctgacctcaagtaatcctccctctttgaccttccaaagtgctgggattacaagtgtgaaccactgcacccgccgtggcactttttttttttttttttttttttgagatggagtctcactctgtcacccaggctgggtgcagtggcgtgaactcagctcactgcaacctccacctcccggattcaagcgattctcctgcctcagcctcctgagtagctgggattacaggcacccgccaccacacctgaaaaatttttgtaattttttttttcttttttgagacggagttttgctcttgttgcccaggctgtagtgcaatggcactctctcggctaattgcaacctctgcctcccgggttcaagcgattctcctgcctcagcctcctgagtagctgggattacaggcatgcgccaccacgcccagctaattttgtatttttagtagagatgcggtttctccatgttggtcaggctcgtctcgaactcccgacctcaggtgatccgcacatctcggcctcccaaagtgcaggcgtgagtcaccggacccaggtcccgccctggcactttttaaccacccacaaatctggatcctacactgaaaagagacactgcagtggctcacgtctgtaatcccagcactttgggaggccaaggcgggcggatcacctgaggtcgcgagtttgagaccagcctgaccaacatggagaaaccccgtctctactaaaaatacaaaagtggccaggcatggtgtcgcacacttgtaatcgcagctactcgggaggctgaggcaggagaattgcttgaacccaggaggcggaggttgcggtgagccgagatcgcgccattgcactacagcctgggcaacgagagcgaaactccgtctcaaaaaaaaaaaaaaaaaaaatcctgagtcccgcttgacaccttttgtcaggcaccaccacctttctgggcgaatgcggtagtaccgtctgctctccctgctgctgtcctgaaatccattcaggcacagcggccgagagctttataataaccgattccaggtgttaggtgctttcccagccccgactcctgcgtcctggacccgcagtcctctgcttaatacctttgctttattagaaaacattctcctctactccgttcagctattcgctgagggcccgccaaccgccagcggttgtcagtggcctagaggcagcggacgcaaacacggggagaggtgcaatcgtctcaagtgactcggcgggcggggcccacaaccggaagcgggtgggcgaccttcacccacgtgcgctgcggcttcgttcgccagcatccaagatggcggcagggcggggcccaaggcgcggcgcgaattgtgacgcaggcgtccggcgtgctccgtgcgcaagcgctttcggcggcgattaggtggtttccggttccgctatcttctttttcttcagcgaggcggccgagctggttggtggcggcggtcgtgcgggttcgcgccgggccgagagcgggttgggggctgcgggaggctgcaggggcctgggcggcagaagaggcggccctgagctggctcatgcgggccagtctcggcagggtggctgggcagggctcgcgaggccacggctcggagcccagaccggggcccaggaggcgagcgccgttttggagaggagcctgcctgctctgcctgccagcgtgaccccacgaggcctcgggcgggaagaggtcctcggggcagatccgagttaatgagagaggggtattgagcgtgtagcgttaactctgccagtcactgcgtcagtcgctttggaaatactaaatttctcgagctgagtcttcatacctggctccattactacgtctgtaaggaggagctggtggtagtgtctgctttttagacttttctttagactatttgtatttttttcagatggagtcttgctctgtcgcctaagctggagttcagtggtgcggtctcggctcactgcaatctccacctcccgggctcgagcgattcttctgcctcagcctcccgagtagctgggattataggcgcctgccaccacgcccagttgatttttgtagttttagtagagacggagtttcaccatgttagccaggctcatcttgaactcttgacctcaaatgatccgtctgcctcggccttccaaagtgctgggattacaggcatgagcccctgcgcccggtcgattctttgtctttttaagtcaacttttatatgtgaacaatgcttggcaggtggttggtagatactaagtgatgttcgtggtttggggtcaaggcaagaagtggggtctggagagttttggtgtaattgagaaggaagctaagagtgttgggtgctccagcttggagttagagaggagagaggctgcgacaggaaggcatgtgtgttgtaggggatggcttcccatccaggctggcagcaggagcagcctgtgcagatcaggacctggctgccgtggaagagggtgggaccgccttcagggaagatggatctagcaagatgatgccaaagggtacttattccatcaggagatactgacgagtccttccgccgctaaacctaaggagaataaccacagtctgtgttcctgaagagcacccgtgcggtcaggagggtggaggacatgtggtctttagttccaggacatgtttagactacaggccagggtgtgtgagaagcctagcagggccaggcttggaggagtgaaaggaagacaggtactggggcaggaccagttggacttggtgcaggcaaagggatagcaactgtggtgtaggcacctgagcttgtgctactcaggcatgcattgctcaccagtctatcctgcctcccttcctcctgcagacgcaaacatgcagatctttgtgaagaccctcactggcaaaaccatcacccttgaggtcgagcccagtgacaccattgagaatgtcaaagccaaaattcaagacaaggagggtgagtagggctgggtgtgggggctctggctgtgaactgggagtccctctctgcccaggggagtctcagtcctgtgtgggttgtgctgactttagatctgttttgcccttgcttctccatgtgatctgaagaacgtttgttatcttctacctcagttggccttttgagaaactgggggtagtgctggagctcccctgcagaggacactgccagtaatatggtccgcagagcctctaactgagcctccctccccctcaggtatcccacctgaccagcagcgtctgatatttgccggcaaacagctggaggatggccgcactctctcagactacaacatccagaaaggtaccggggttggggttgctgggcagggacccaagatccccaggtcctaggaaaggagcattgatggcctcaggggttggggagcagttcaaatgacttgtgttttgtttaaaataatgggactgggcacagtggctcatgcctgtaatcccggcactttgggaggcttaggcgggtggatcacctgaggtcaggagttcaagaccagcctggacaacgtggtgaaatcccgtttctattaaaaatacaaaaatcagctgggtgcagtggctcaggcctgtaatcccagcacttcgggaggctgaggcgggcagatcacaaggtcaagagattgagatcatcatgaccaacatggtgaaatcccatctctactaaaaatacaaaaattagctaggcatggtggtgcgtgcctgtagtcccagctactcaggaggctgaggaaggagaattgcttgaactcgggagacaaaaaaaaaaagtcataatgtgaatttttttatcactgcaataaggaaattagtgtcacttgtgggagcgacaagaattcagtgtcctttttttgtgagacagagtcttactctgtcacccaggctggagtgcagtgacgcgatctcactgtgacctccgtctcccgggttcaagcgattcccctgcctcagcctcccgagtagctgggattacaggcacccgccaccacgcccagctaattttttttgtatttttagtagagacagggtttcactacgttggccaggctggtctcttaaagtgctaggattacaggcgtgagccatggtgccccgcctagacttcagtgtctgaccttgcctgaaccacttagaggtcggcttccatgttagaaacccagatggatgcctcagttggcatgtgtcagtctcagactccccccagggctcgtggtcagtgctgagatggagatttcctggggcaggctggctgggacagtgtatcttccacacgtagaacactcgggggatcccgacttggtgtccccatcacacttgagaaagcagcagactataggccctggagggtcctgcccctgtgactgaggagccagggctgggctcagtcgccgtccttctggctgtctcctgcagagtccaccctgcacctggtgttgcgcctgcgaggtggcattattgagccttctctccgccagcttgcccagaaatacaactgcgacaagatgatctgccgcaagtatgtgtgctccgatgcttggggggctgtgggggctgccggagtcggggtatgccctcacccacccctcctgtctctgtgcaggtgctatgctcgccttcaccctcgtgctgtcaactgccgcaagaagaagtgtggtcacaccaacaacctgcgtcccaagaagaaggtcaaataaggtggttctttccttgaagggcagcctcctgcccaggccccgtggccctggagcctcaataaagtgtccctttcattgactggagcagcaattggtgtcctcatggctgatctgtccagggaggtggctgaagagtgggcatctcccttagggactctactcagcactccattctgtgccacctgtggggtcttctgtcctagattctgtcacatcggcattggtccctgccctatgcccctgactctggatttgtcatctgtaaaactggagtaaaaacctcagtcgtgtaattggtgggactgaggatcagttttgtcattgctgggatcctgtcaggcactttgaggtgtccctcaggccttggccctgaagtgtctaggtgtgtggagatgggtagaaaattaggtacacccaatggtgtagaacgttgattctcaaatttttttattttatacaaatggggtctcactatgttgtccaggctggtcttgaactcctgggctcaagccatccgcccatctcagcccctcaaagtgttgggattacaagcaagaactgccatgcctgacccagttctcagttttttgtttgtttgtttgtttgtttgttttgagacggagtcttgctctgtcgcccaggctggagtgcagtggcgcagtctcggcttactacaacctctgcctccggggttcacatccttctcctgcctcagcctcccgagtagctgggactacaggtgcccgccacaactcctggctaattttttgtatttttagtagagacggggtttcactgggttagccaggttggtctcgatctcctgaccttgtgatccattcgccttggcctcccagaatgctggtattacaggcgtgagccagcacgcctggcccagttactcagttttgaatctgaggccgtgacatcactcatggtctgcagtcagtgctctgcccctgagctgtaccctctcctatgataatcactcttaagaagggcaacccttggtgttttccccttaaggtcacccaggctggaatgcagtggtgtggtcatggctccctgtaccctggaactcaggcttgggtgatcctctctcctttgcctccgaagtagccaggactacaggtgtgcacccaccaccacactcagataattgctttggtgtttttaaagcttgtaatgatcagtaggctgaggtgggcaaatcataaggtcaagagttttttagatggggtgagcacagaccaattcctgttttatttactgatttaaaattttgagacagtctcactgtcacccaggttggggtgcagtggtaggatcatagcttgctgcagccttgatctcccaggatcttgcctcagcctcccgagtagctgggactgcatgcttgtgccaccacactcggttaatattttgtagagatggggtcttgctatgttgcccaggctggcttcaaactcctgaacttaaaagcctcctgtttagttttggttttttatcactttttttttttttttttgagatggagccttgctcccatcgtgcaggctggagtgcggtggcgcagtctcggctcactgcagcttctgcctctcgggttcaagcgattctcctttctcagcctcttgagtagctggaattaccagtgtgcgccaccaccaccacgcctggctagtttttctgtttttagtagagacagggttttgctatgttggccaggctggtcttgaactactgacctcttgtgatctacctgtcttggccttccaaagtgctaggattacaagcgtaagccacagcgcctggccttgctacatttttttttttttttttttttttacagacatggtctcgctatgttgcccagaatggttttgcactgggtccaagcagttctgccgcagcctcccaaagtgctgggattacaggggtgaggcaccttgctggcccctgttttgattagggtgcagtgctggtgaagccggtgcacgaggccagtgatgcatcctaatgaggggtggagttggcgggacttcctgggccagtttggggactttcacaaaagacccccatgactcagggttttgagttcttaactgatcgaatgaaggattcaaaattaaccactccaaggggggattgaaggaagaaccactcttaatggacaaaaagaaagaaaggggagggagtaacagggatatgagctctagccgcccaagctagcaatggcaacccttctgggtccccttccagcatgtggaagctttcctttcgcttcattcaataaacagctgctgctcactctcctggtccgtggactctttttgaactgttaacactccccgcaaaggtccgcagcttcattcttcaaagttagcgagaccaggaacccatcggcaggagaaactgactcatcgtgggggctcacccaggatttccaaagcggtaacatcggacctctttcgcttgctactctgctctacttttctttagaattgagggcaaacaccgggcacctgtcggccatttaaaagcgacaagtgccgccgcctgactaaagacacagatgtaagggtatctgagaaagggctctctaacaacccccagcccttctgaatcgagagtgttgttttgcctagaaaccagttcccactttctctgcattttctgggttgaaccgagggctggccaagggtggaaaacagtggccccaagctcctggtaacgcccagtcgagatgacagcgctttgtgaaacctttgttaaacagccacccaaacgcacttcacccacccttcgagaggcatgcctcctaggtccaaacgtctataaggaagactttcttgagaacttgtctccaggattctctctacccccaggatgaaaaccctctggattaggaatctaaaacaattaggatggcaaccctcagatctgtgttcctgatgtgccatggcttatttttttattttttttgagatggagtctcgctctgacgcccaggctggagtgcagcggcacgatcttggcccactgcaacctcaacctcccggattcaagcaattctcttgcctcagcctcctgagtagctgggattacaggcaccacgtgccaccatgactggctaatttttgtatttttagtagagatggggtttcacatgttggtcagactggtctcgatctgacctcgtgatctgcccgcctcgacctcccaaagtgctgggattgcaggcgtgagccactgcgcccggcccccatggcttattctaatgtagatgggcaacaatgcaaatatacaggacctgttccccatattcgacaccgaaggcaatacccaggacaatatagtgtgtgccaatggttactggaaggcttaggccatttctctttctgtcgtccccacctcactgggaaccatttcacctatcatttctcttgtttaggatcagcaatccaaactacggagctcttccactcagggtaccactcgcatttgtgggagttaagtaaaataatagaccatcgactgggagatcaaaagtagtattcttaagatggaaagcggggacaaaaggctgtagtgcatgagacactatttcagccttggcccaatcccctgttgccccccgccttaaaattgctatgtctatgtacaatctttaaggagttcatcttactggggcagtttcaagctcagaaatatgctaactggagccttgtaaaccacctaagaatacaccccaaacttagaacccactcactggaacaaaaactttcgggcgcactggtaagaggccgctaaacccagcagcctggcctccttctttgtggctaagaagggagggaaaagaatgtggttgaaactgctacgtcggtaagcacaattaaatctgataagcagggttccatgggtgattgtgcaccctggaaaatggacactaaaacagtaggggacctgctagaaccagtgtccactgggaatgactaggggtgcgggcatccctatgctttcctttcagatgggagattttccctccaaagtgaagtcgcccctgaggtgtattctgaataactgggaccaatttgatccccagacattgaagaagcagctcatatttttctgcagcactgcctggccacaatatcctcttccaggaggagaacgatggccacctgagggaagtatacactataataccatcctgcaactagatctgttttgtaaacaagaaggcaagtggatttaggtaccatatgttcagacctttttctcattaagggatgataacccacgattgtgtaagacatgtaacctgcaccccacagggagtcctcaaattctacccccatacccagtcctccccacggctcctcctactaatgccaaaccctctctggcttctacagcccaaaagggaacaaataaaagagccttcagagagccaagagaccccactggcccctggctatgtcctcttcaggctgtaggaggggaatttggcccaacccgagtacatgttcccttttctctctctgatctaaagcaaattaaggcagacttggatgaaagttctcagatgaccccaatagatacgtagatggcctgctgggtctgggacaatcttttgacctttcctggagagagatcatgttattgcttgatcagacctaacctctaatgagaagaatgctgctttaacaggagcccgagagtttggggatacctggtacctcagttaagtaagtgatagaatgacatcagaagagagcagtttcctactggccagcaagcagtccccagtatggatccccactgggaccctgactcggatcatggggactggagtcacaaacatttactgacctgtatcctagaagggttaaggagaactaggaaaaagcccatgaactattcaatgatgtctactataacccaagggaaggaagaaaaccctattgccttcctcaaaaggctgagggaggctttgagaaaatatactcccctgtcaccagattccctcgaaggccagttaattttaaaggacaaatttattactcagtcagctgcagacattaggaaaaagctccaaaagttagccttgggccgagcaaaatttggaggcatcattaaacctggcaacctcagtgttctatcatagggaccaagaggaacaggccgaaaaggaaaagcaggataagagaaaggctgcagatttagtcatgccctcagacaaaccttggcggttcaaagaggagaaaaaatggagcaggccaatcacccagcagggcttattatcagtgcagtttacaaggacactttaaacaagattgtccaaagagaaataagccgccctctcacccatgtccactatgccaaggtgatcactggaaggcacactgtcccagaggacaaaggttctctgggccagaagtccccaaccagatgatccagcaacaggatggagggtgcccggggcaagcaccagctcgtgttgtcaccctcacagagccccgggtaagtttgaccattgagggccaggaaatcgactttcttctggacactggcacagccttctcagttccactgtcctgccctggatggctgtcctcaaggtctgttaccatccaagggatcctgggacaacctgtaaccaggtatttctcccgcccccttagctgtaactgggaaaccttaattttctcacatgcctttctcatcatgcctgagaatcccatacccttactggggagggacatattagctaaatcaggagctatcatctgtatgaatacagggaagaaaagacctatctgttgtcccctacttgaggaaggaatcaaccctgaggtttgggcattagaaggacaatttggaggggcaaagaacgcctgtccagtccaaatcaaactaaaagaccccacccctttcccttaccaaagacaataccccctaagacctgaagctcgaaaaggattacaaggtattgttaaaaatttaaaagcccaaggtctagtaagaagttgtaacagcacctgtaacaccccaattctaggggtacaaaaaccaaatggtcaatggaggttggtgcaggacctcaggctcataaatgaggccataattcctttatacccagctgtacccaacccttatagattgctctctcaaataccagaagaagcagagtggtttacagtcctgaatcttaaagatgcctttttctgtatccctctacaccctgactttcaattcctatttgcctttgaggatccctcagatcaaacatctcagctcacctggacagtcttgccccaaggatttagagatagccctcacctgtttggccaagcattggcccaagatttaagtcacttcttgcacccaggtaccctaattcttcaatatatggatgacttacttctcccgttgagagaccctgtgccatcaggctacccaagactttttttttttttttttttgagacggagtcttgcactgttgcccaggctggagtgcagtggcgcaatctcggttcactgcaagcttcgcctcctgggttcatgccattctcctgcctcagcctcccgagtagctgggagtacaggcgcctgccaccacgcctggctaattttttgtacttttagtagagacagggtttcaccttgttagccaggatggtctcgatctcctgacctcatgatccacccacctcagcctcccaaagtgctgggattacatttgagcccaaggccttttaaactttctagctgatcgaggttacaaagtatctaaatcaaaggcccagctttgtttacagcaggtcaaatacctagggctggttttggctaaaggaaccagggctctcaacaaaaaacctatccagtctatactggcttatcctcaccctcagacattaaaacagttgacagggtttcttggaataactggcttttgccaactgtggatccccagatacagcgaaatggccaggccactttacactctaattaaggagacccaaaaagctaatacccatttgatagaatggggaccagaggcagaggcagccttcagaaccctaaaacaggccctaacacaagtcccagttctgggtctacctacgggacaaaatttctctttgtatgtcacagaaagaatgggaatagttcttggagtccttacccagacttgagggactaccatacagccagtagcatatctgagtaaagaaattgatgtggtagcaaaggactggcctcactgtctgcaggtggtagctgcagtggccattttagtattagaggctgtcaaaataatacaagggagagacatcactgtatggactattcacgatgtcaacggcatactaactgctaaaggaggtttgtggctgtcagacaatcgcctacttaggtaccaggccttattacttgagggactggtgcttcagatgcgcacttgtgcagctcttaacccaaacttatgctgcccagaaggatcttttagaggtccccttagccaaccctgacctcaacctatatatatactgatggaagttcgtttgtagaaaagggattacaaagggcaggatataccataggttagtgataaagcagtagttgaaagtgggcccctcccccagggaccagcacccagttagcagaactagtggcgcttacccgaactttagagctgggaaagggaaaaagtataaatgtatatacagagagcaaatttgcttatctagttctacatgcccatgctgccatatggaaagaaagggagttcctaacctccggaggaacacccattaaataccatgaagaaattatgaaattattacaggcagtgcagaaacccaaggaagtggtagtggccttgcactgcaaaggccatcagaaaggcaaaggaaaggaggcaaaaggaaatcgctgcacagacgctgaggccaaagttgccgcaagacgggacctcccattagaaacacctatggagggacccttggtatgggataacccccttcaggagaccaggccccagtattcccctgcagaaatggaatggggactttcatggggacatagttttctcccctcggggtggctagctactcaggagggaaaggtgcccatacccgcagctaatcaatggaaaatacttaaaaccgttcaccaaacattccataggggtattgagaatacccatcaaatggtcaaatctctgttcactggacgagacctccttaaaaccatccggcagacagtcaaggcctgcgaagtgtgccaaaggaataaccccttggtccattgccaagcccctcatggagaacaaaggacagggcactaccctggagaggactggcagttagatttcacttatatgcctaagtcacggggacttcaatacttactagcctgtgttgataccttcacgaattgggttgaagccttcccctgtaagacagaaaaggcccaggaggtaatcaaagccctggtccatgaaataattcctaggtttggacttccctgtagtttacaaagtgataatggcccggctttcagagccacagtgactcagggaatttccaaggcgctagggatacaatatcaccttcattggccgggcgcggtggctcacgtctgtaatcccagcactttgggaggccgaggcaggtggatcacgaggtcaggagatcgagaccatcctggctaacacagtgaaaccccgtctctactaaaaatacaaaaaatttagccgggcgtagtggtgggcgcctgtagtcccagctactcgagaggctgaggcaggagaatggcgtgaacccgggagatggagcatgcagtgagccgagattgcaccactgcactccagcctgtgcgacagagcgagactccctcaaaaaaaaaaaaaaaaaatcaccttcattgcgcccagggaccacaatcctcagggaaagtcgagaagattaatgaaacactcaaaaggcactcaaggaaattaacacaagaaactcacctcccatggaaactcaccctcttgcccatagcattattaaggatcctaaattctccccacaagataggactcagtccttatgaaatgctatatggacagccttttctcacaaacaacctcttacttgattgagaaactgccaacttggtcaaggacataacttctttggctaggtaccagcaaatcctaaagacattacccgagggatgccaccgagaaaagggaaaagcatcgttccatcccagggatctagtattagtcaagtccctcccctctacctccccatccctagatccatcgtgggaaggaccatatttggttatcctctccactccaactgcagtcaaggtgattggagtggagtcttggatccatcacacctgaatcaaaccttggatacagcctgaaaaacccgcagaatcattagcttgggaatctaagagtcagccagacaaaccttcttacacccacgagccattggaagacttatgtatcctctttcagaaggaaaattaatcagtgctcataagttctacctcagttcttgttttaaaaacagaatgtactctaacatcctaacattccttgcctttgcccaagtcttaacctttccccgctcaatgtcttcccctaatcttgagggaattattattattattattattttttttttttttttttgagacagagtctcgctctgtcgcccaggctggagtgcagtgacgtgatctcggctcactgcaagctctgccttccgggttcacaccattctcctccctcagcctcccaagtagctgggactacaggcgcccaccaccacacctggctaattttttgtatttttagtagagacggggtttcaccgtggtctcgatctgctgacctcgtgatctgccctcctcagcctcccaaagtgctgggattacaggcgtgagccaccgtgcccggcctaccttgagggaattataaacatgtcctccaggtttttatttgaagcacttcccaatcagagtaactcatcctgttgggtttgcatgaaccctaatttcccccttatatacagcagttccggcccccctcaacatatgggtggaaagctctgaggcctcatacatagctaacacttctaagggtccaggattttttcatcctagtgataggtccaatttccctgacagggctcaagcagccttaaaagcagccgccgccattctccgacaattcgctctatcagctatcccaatcataggttctgtgggcacaataacctccttctcttcgcctccactcctttgtatctcccatcaagtgttcccatgatcacaaggtgtgggacacgtggctggctgcaactatagcttgccttggatatagagttcaaatattctaattcttacagtacgactactggcaccccaatgttttgtggaaataaacatgagttccttggaaaccctatttcagtcacctatcccttaagatttaccaccccaagccaaataattcccccaccagaggccaaaacaacaagcaattactgctggggcagacttccttttgcccaggatatccccctcctgggacttggttcctctctcacaggcaaagggttaaaaaaaccccattgcttcctgcttcctgtctggggtgcgcgagtttttctttttgttgttgttgttttgttttgtttttgagatggagtctcgctctgtcgcccaggctggagtgcagtggcgcgatctccctcactgcaagctccgcctcccaggtttgcaccattctcctgcctcagcctcccgagtagctgggactacaggcgcccaccaccacacccagctaattttttgtatttttagtagagatggagtttcaccatgttagccaggatggtcttgatctcctgacctcgtgatccaccagccttggcctccgaaagtgctgggattacaggcgtgagccactgcacccagccgagagtttttcttaatgcagctagccaccggtttgccttacaggaaccccataatacgtccttggcaaattctattcagctccaactgctaggagtggcccatttgtcctgaaccctcaaatcatgggaatgagaaatgaatttagactgaccacagcccttatgagttttcagctacaggggtgtatagaaccctgataaggagttttctttgtgtgtggaagatccttctatatttgcctccccaccaactggacaggaacttgtactttagcctacatagtacctcctgtgacttattccttttcagaagaggcagtagctgtgcccattcatgctaagcttcagccgagagcaatctcactacttcctctattggctggtttaggatttactaccacctaggaagtggactcacagcctagatgaaatctctctccaacttactcaaatccaggaccaaatagactcattagcagctgtggttctccagaaccagtgagcactagatctccaatctcctcactgccgaaaggggaggaacatgcctttttctgaacaaggaatgttgtttttatgtcaataaatcaggcatagtgagagatggaattaaatgacttcaggatagagctagcagactacatggtgggacaaccgaaactacctcagggttctcacagcctgttctccactggcttcttccatttttaggtcccttccttatgattattctaggagtaacctttggcccatgtcttttcagttccttcatcctttcgtttcttcctgaatagaatcaatgaaactagaaatgttactgcagatggaacctcagatgacttcaaccagcacctattatcaaggacccctaaaccagcctgccggcccatacccggacgttgacacccaaaccacctctcacgaggaaacctcagctacagaaccccttctatgcccctattcagcaggaagcaattagagtggtcatcctcccacaccccaacagcagttgggctctcctgttgagagaggggactgaggggtggagttggcaggatttactgggcaggtttggggactttcacagaagacccctgtgactcagtgttttgagttcttaaccaatcgagtgaaggattcagaattaaccactccaggccgggcgcggtggctcacgcctgtaatcccagcactttgggaggccgaggcgggcggatcacgaggtcaggagattgagaccatcctggctaacccggtgaaaccctgcctctactaaaaatacaaaaaattggccgggtgtggtggcgggcgcctgtggtcccagctactggggaggctgaggcaggagaatggcgtgaacccgggaggcagagcttgaagtgagccgagatcgtgccattgcactgcagcctgggcgacagagcgagactctgtctcactaaaaaaaaaaaaaaaaaaaaacaaaaaaaaaaaacactccagaggaggattgaaaaaagaaccactctcaatggacaaaaagaaaggggaggggtaacatagggatatgagccctagccaccggagccagcaacggcaacccttccgggtccccttccagcatgtggaagctttcctttcgctttgttcaataaactgccctgctgctcactctcctggtccgtggactctttttgatctgtaacacacaccgcgaaggtccacagcttcattcttcaaagttagcgagaccacgaacccatcggcaagaaaaactcccaactcactaacagcctagtcccttcccccttaaaggctggtgtctgtcaccccatacctgagctggtccctcttcactaagtcaggctaccagcatcttcctgctcctccggctgggcccctggaggaggaagctttccaaagctctgtctagcccatgtatccctccagcaggaagctccaaggcctcctctgtactttgaggtcgttctggcccctgctatgctccaggctcagggctattacacaagacacccaattcaactcggtgggctgttgacaccgtccctgtcactgaatcttgtcttcacccctgtgattctctgaagagccagtgaatctctgttaatgttggtggagttccagccactgcactttttttgaggcagactcactgtggctccggctggagtgcagtggcatggtcatagctcatggcagcccccaactcccgggctcatgtaatcctcccacctcagcctcccgagtagctgggactggaggcgggagccaccatgtcgggctaattggtttttctgtagagatcgggcctccctaggttgcccaggcttacttaacactcttgaacgtcaaaacccacgctcagtacccgcttcaagtggaagtcggtgttgagatacaagcataggaacgaactcaaggctaacagctgttctgtattcagagccgcacaatcaaggaaaaacacgatcggaggcgggccctggacgggaacaagaagggtgggcttgactgggcggcccgcggtcttggttcccctttcttccttctggctggccggccgcagggtagggggtccgtggacctcccggcctgtagggggcgtcgggcgcagcggaagggcctgctccggagcctggccagggctgcgcagtcatgatcaccgagaccgcggcggagcctacggtccctgcagtgcctgctgctgaggaggccaccgaagctcggggacgcgaggagccggcgtggccctgggtgagcccaggcccaagcgggaacgggcgcggggcgggcggcgcagacccaggggcgcgggcttcatgccccagccgtgccccctgtcccgcagaaagacgccccgatccggacgctggtgcagcgcatccaccagctgcaggctgagcgcgcgcagggcttccgccgactggaggagtgagtgggggcgcggaggggctcagggttcggtcccccgcccgctccgggcgtgggcgtgttctcggcgggcgtgcctggaggaggagctgggtccttgtgtggctgcagagtcagatggggcggggatttcggggcaccgggtcctcaccttcacgaaaaaggccccacagcacgtccccactacccgacgactcactcttcgtggcttctctctcctccccaagagcaggggtgggcctgtctcgcgttcccctgcgggagtcaggaagcgtccttcctacctaccagtcctcccctctggtgtctggggacacttcctgggggcctttcaggtggttggcgccggtgcagggcctgagagcctgggggcgcggcctcagggtccccacatgccgcagaggccaccgccagtacctgcgcagcggccctgactacgacttcgcgcgctaccggagcacagtgcacggggtgacccaggccttcgccgccgcctcgcgggaggtgctggcggtggaagcagagctgggcgggcctcgcaggcagccgctgctcgccggccacgtgcgcagcctgcaggagctggagcagacgcggctgggcacggtgaggccaccaccccttccccgccgtgtctctaggaccctggccggctcctctcatgacgcacccctggttggggggtggtcccagtatcccatacacagacctcaccccttcctgtcccaccccaatcctctattaaggcttcacttggggattctcggaccttgccctctgctgttcatccccaatttttttcccaagttttgtccttattcccagagcactcccgctttctcccagctccgcctaaatgctattccaagatgcccagatcccgccccaacaatgctccacccactctggttgttccgcgtctagggtcccaccctcaacctcccgtagatacaggcgaggggggtcccaggccacgcctcctccgtattattcctccatcacagctttagttctttgcctatttctctcttgcgatccgcctgctcggccctgcaaccgtgtgtgactggaattcctaggccacgccccccatgagcgacccgtctcagcgtctctttggcctttttctttctggtgttttttttttttttttttttttttaagacaggctcttgctctcttgctctctcacccaggctagagtgcaatggcgcgatctcggctaacggcaacctccgcctcccagattcaagcgattctcctgcctcagcctcctgagtagctgggattacaggcataatttttgtattttgtattttttttagtagagacggggttgtgccatatgggcaaggctggtctcgaactcctggtctcaagcgatccgccctcttctgcttcccgaagtgctgggatttcaggcgtgagccaccgcgtccaggctttttggcctacttttatcctgggtccccgtccctgggaccatgaggcgcaacctaacccacccctacggccaatgcctggctaagacgtcactgttgttcccaggccacgcccacatcgcgctcagcactgcctctggcctgcctgctgtctcctttctgagagagcctctaaactgaatttcggactcttcctacacaaagcactgcccctcgtggttctacccgggcactgcctttctgggtgcctctgttttttcctgaacatccttggagggcagggggtgggttctgctcgtggagacatccttcgtgttgctcattcccccaccaggtggccctgctgcagttgatggagacgccagagctggcggggcaggaggacgctgtacggatgcagcagctgaaaatgaagtgagcgctgctgcccaagccgcctggctatgctcgatttgcaccagggttggcacggtcaggacgctgccagcagaggaaccctctgccagtgcacaatggtgttctcacctggtggccctcagatgtacacttccccagagggcacagccgtgaaacttcacatcagtttcgctgtgcattgctgggacactgctgtatacctcgacacatgccaatcctgcacacgtggctgtccgtggagcttggacatgccccactgagcacagaccttcagatgcctgtcctcagcccccaagcacacacactcatgtacacacacatttgacaaagtcacacttcataacctcctaatggtacacaccccaccaagatggccttttcttttcttttttttctgagatgcagtctcactctgtcaccaggctggagtgcagtggcgcgatctcagctcactgcaacctccgcctcccgggttcaagtgattcccctgcctcagcctcctgagtagctgggactacaggcgcgtgccaccacgcccagctaattttttgtattttagtagagatgggtttcaccatgttggccaggatggtctcgatctcctgacctcgtgatctgcccacctcagcctcccaaagtgctgggattacaggcgtaagccagcacgcctggtcctttattttcttttcttttttctttcttttttttgagatagagtcttgctctgtcacccaggctggagtgcagtggtgcggtcttggcttaccgtaacctctgcctcctaagtagcttggattacagatgcccgccaccatgcctggctaattcttgtatttttagtagagacggggattcgccatgttggccaggcttgttttgaactcctgacctcaggtgatctgcctgcctcagcttcccaaagtgctggattacaggcgtgagccaccatgcccagcccagatggccttttctctcagcccactgtgacctatggggccaccccttctccctagcacctaagtgttccctcttgctgctagtgctgcctggaggtttggcggcgggcaggagggcctggggctcaccacagccacagccctcttgcagcttcgcggcagcagctaattcaccccatctgggttttatttatagttcccatccgctcttgtagggtaattaaaaccatggaggcgatcagcgaggttctccaggaccttaggtttgatgcggaatctgccgagtgatggcggctccccagggatgcgccgagggagatgggaaacggggcggatggcgcccagcccagccctaactgccagctggctggggttgcgccccactgcgctgctgaccttcctgcagttccagacacctcccacaataaagagctcctcctctgtagccgctctgccatctctgtgtacaagggtgctgcagccagtgtgcctagggagggggcccccacagggccagggattgtgggtagaagactcccaccctccctagaaactgaggtttttttgcttgagacagggtcttgctgtgtcacccagactggagtgcagtggcgagatcgtggctcactgcagccttgacttccccaggctcaagcagtcctcctgcctcagcctcccaagtagctgggactacaggcacatgccaccacaagcccagttaattttttttttttttgagatagagttttgctctttttgcccaggctggagtacaatggtacgatctcggctcactgcaatctgcacctcctgggttcaagtgattcgcctgcctcagcctcctgagtagttgggatcacaggcatgcaccaccacgcccagctaattttgtatttttagtagagacggggtttctccatgttggtcaggctggtcttgaactcctgacctcatgtggtccacccatgtcaacctcccaaagtggcgggattacaggcgtgagccatggcgcctggccaattttttgcttttagtagagatgaggtctccctttgttgcccaggctggtccccaactcctggccttgagcagtgctcccagcttggcctcctaaagttctgggattacaggcatgagcctttgcagccagccagctcaggtattttgaatcacattctccaaggagttcagaatcagaccttgcaaatactggatagacagtctgaagtcctgggaggtgaaaattctaatctcaaagggtcattaagacgcctcacattcccctcaaatctcacagcccccaccccaggccaggcaggccccaaactcaccttcacaatcacagcacctaaatagctcatttatttaaaaggactcttttggaggggccctaggtaatggggagtaatgactccccttctcacccccagccctggcaggggttctaggcaactcaaccaaccctcacacacacacacacacccactggggtgcacccaaaggtggcctcacgtgggagtcagagctgttatggccgttggagctcaggggccaccccagctcctgctgagggtggctcaggtgccctgaagtgagggtacagaggtggccccagtttgggttcggcctctgcgtctccacgtggcagggagggtggcctgagcccctacagcttatctggcaggacctgcaggcagaggggaagccaagctaagcagggagtccaggagagggccgcaccacagagccactgaaggaggcttcattcgtgtcctgtccccaccgcttctggctgtgtgactttgggcagggtcctgcccctctccgggccttggcgaggctatctgagctgcaggtaaagcacttggcgcggagccagtatgcagtaggcgcccatgcgtgctaactagggtgagtatgttcattcatttcggaggagattccacttcggacattttcagggcattgaatgttcttaggctaaaggagacaatgccagttatacagtaagtgctaagtaaatgctgatgaataacaaaggaagaggacggattccatctcagcgactctaaggctggggttgggaggcgtgggggtgtgaacaagacctgcagccaccggaaggggccctccccttgctccctcccgcccacccattcaggcccaccttacctctcgccgtgccccgtctgcccgagggcaggatcccctcgtcctgtgcttggaaggaaggcagaggtgtcgtgggggctgcagacctgcgtccacagcctgctgtcttccccctcccctgttttctgggcccccccagctccctgtccccacccccacgcccgagggtccctccttcctacctggttgcgggtcttgtgcgacttctgcatccaggctcgccactggtcgtagaggcggaagctgaggttggagcagtacgcgtgcttcttgagccagcccaggaactgcttgagctcgcgccgcaccggccccgagctcggctctccgccccgcggttcgcacgccccgccgcccgggcccgggcgctctggtggtgggcggagcggcagtgtcagagcgcgcccggcagggggtgcgcgcgggcaggagaggggagaccccggcgcggcgggaccatgctcccctcggggaacctccctccccgtttctcaaggaccgagtcctccccgcggccctgcacagcagcccagctgcgcccctggcccggctgcgcccctggggaggtgggggggagggggaaggaaggggctcctcctccacatctcctccaggaacccgattcctgtggcctgagccaggtgcgagtggagtggggggaggggagaatgagagaggccagagccggggggatgagacatagagatagacagacagagcagggggccgaaaaagagaaagggagaaagacgcacggatgagagagccggggccagggatggagagatggagacgcagggtgggtgaaagccaagggtgtcagcccaggaggaaagggcctgatcagggtaggacagaaaccctggggacatagggacaaagagatcgagacagagacacagaggaagagtgacagatgaagggagaccgagtgcaagatgaccccatgggactgtccccagcatgggcccatgggacagggagtgggccaggagggccaggtgggaggcctgcctgtcggtccagctgccggctgcagccagcccccagcaggccggcggataaggacatcggcctcacgtcataaataaagccggggacccgctgacaggccctggcacggccccggcccccgccgcccctgctggccttccccggcctccccagcctcccctgcggacgcagcggcctgctggctcctgtgcaagaatcgcaggtgccgggcacgagcaggggccaaggctcaggcccctcccggctgcgcttgctcccgcccacccctgaacctggaggggcccaggataggggctggggagctggctggagcctgactctacccctccctagctctgggaccctctctgggcctcagtttccctatcatctcacgagccagagtgagcttggtcttcccggtgaactaagtttagacctgtgtgacctcctagagcctcagtgtcctcacctgagaaaaagcggcctcccttgcagtgaaaccctggggggatgggacaataagtacctccatgccaactgcctgcaaacacttaggtggcacccaccatgtgggcacttgccacaaattatgtcatccaaccctcataacagcccaaggcaagtgggattctcgaccccaccttccagatggggaaacggaggccagacattccaagtaacagctttcgtttcatttcacaaaagagagactagaggcctgtggacccggagaaatcccagacagcaagaggaagcagacctaggcacctaatcattcccatccccctgccttgatcagaaggagaaattgaggcccatcaaagtgggagttggcagcccattggccttagaagcaggggtctcaaactcactggccccctcttaggagggagtctgagtggccaaaacagaccagatggggatgggcaaatggagagtgagggtcctgagaaggggagaccactgctggtgggggctgtaggccatgctgttacattttctagataatttatttttctagggaatctaggatatttgtgtaaaaacttcctgggtttaaaatttctactagttggtcaaactttttttttgttttccaaacaacaggccaaagaaaatagatccaagggccacattcagctctgggggggccaccagtttgagacttctactctcttggagacaatcaggaaacaggctgggcatggtgtctcacacctgtaatcccagcactttgggaggccgaaatgggcagatcacccgaggtcaggagttcgagaccagcctggccaacatggtgaaatcctgtctctactaaaaaatacaaaaattagctgtgcatgttggcgcgtgcctgtagtcccagctacttgggaggctcaggtaggagaatcgcttgaaaccgggaggcagaggttgcagtgagtgcagatcacaccactatgcgacagaatgaggccgtgtctcaaaagaaaaaaaaaagaaaagaaaacaaggaaacagaggctctagctggtttcggactggccgctggatcacccagccctaggagggtgctcaccactgcggggagtggaggcggctgtggggtggctccactcactccagatcccggctttcttggagccatagatgccaaaggggttgcagcgcacttgcacgaagtacacggtgccgggtttcaggccggccaggcggcaggaggtctggttgctcacatcgtccaccacctggacagtgaggacaaggtcagagtagagggcggggcctagcaggagcgggggcggggcctggaaggaacaggggcggagtcagggaaggggagggtcaccttccagtccacactgtcctccactcggtagcggatctggtatttggcttgaaagaggaaatccttgagggcgggtggcgacacccagcgcacgctcagctggtcctccaggcccccgacgcggctcacgtgcacgtcgggcggggggtccgtggtcactgcggggcagaggagggaccctctcagcctgggactgtctgggtttaactccccccagcagtgtggcccagggcacttggcctagatggaacctgcctctgttttcctcctcttccctctgcccccacccccaggactggtggattacacgatatataatattggagaaacactcagcacctaattaatgttagctgttatcaccattattatctgtgacgggagaaacataatcctatcttcaactgactatgggaaagcagccattgcggggttgatgatattattattatcatgcttaggaggccaggggctgtcaggccgtcagccttctgggaacctccctgccaccccctccccactcacacctcccttccactcttttttttttttttttgagacggagtctcgctctgtcgcccaggctggagtgcagtggcgggatctcggctcactgcaagctccgcctcccgggttcacgccattctcctgcctcagcctcccaagtagctgggactacaggcgcccgccactacgcccggctaaattgtttgtatttttagtagagacggggtttcaccgttttttagccgggatggtctcgatctcctgacctcgtgatccgcccgcctcggcctcccaaagtgctgggattacaggtgtgagccaccgcgcccggccctcccttccactcttactgaaatctttgatgtgacattttgctgggtgcagagaagcaactgaggcttagaactttcccactgtagcgttaggatgtggggaagagtgaggcaggctgcgggggcagggatgggggctacaacccaggcgtatgtgtgtgttggggggttctgaggatccttctgggggcccctgagggcagcagggtgagctggcctctccccctgaggccttggtgaggggcctaaagggttaaggcacaggcctgcttggggctgagaaacaccctaattagattaggctcaattctgctcacagatcatccatttcctgcctcccgccctgcgccccccagctccaggcctcggcttcctggggcgcctcccgacctgggcgccccctcccctctccccagggccccctcctgcacacctgggctgccgagggggtggtggccaggccaggtgttctctgtggagtgggggtatcctggctgtttctgggggctgcggactgatgagcggatgctcagctacttacctaccttccctctgaccagcagggacaacccgggagttgccgggctggggaggggcaggtgggaccctaggaaaaatgagaaggtgcaggggacccctcgggatgctcggtgggtggggctggtgccgagggaggggcctagcagacactgggggctcacccacatccaggatatccagcgtgagtacatcggagcgggcagagcccaggcggttggtggcctccacccagatctcatagggcgtaaagagagccaggtccttggggatgtggcaggagtggggccccactgtgtggtactcctcacatgtgttgtcctggccataccacctgcggggatgggagggcgacaggacgcatgagggttccttgtggcccccagacctcaccatggcagcctcagggtgcagacaacacatgggggctcagagagggtccgcgttggtcaaggtcacgcagccagcctgggacacacacatcgccctcaggccaccaccaacctaagcttgtacttgagggagtagttggtgtggaggaaggtctccccgtgggcccctggcgtccagcggcaggtcaagtccttcatgttcttggaccagcagctgatgttgacgggtttctctgggggcactgggagaaggggagggtgcaggaagcaggctgagggtctggactagctgagcctcggctgaggggttgctgcccacccaccaggcccccaccttggagtggaaggagggcagacaggacagtctcagccctgtgctgagaaatgccagcacagttggtgtgacaactgcaagggctcttgagaggctggtgactcgatctccgggttctttttcttttttcgaggcaaagtctcgctctgtcccccaggctggagtgcaatggtgccatctcagctcactgcaacttccgcctcctgggttcaagcaattctcctgtctcagcctcccaagtagctgggattacaggtgcctgtcagcacgcctggctaagtattgtatttttagtagagatggggtttcgccatgtaggccagcctggcctcgaactcctggcttcaagtgatccacccacctcagcctcccaaagtgctgggcttacagacatgagccaccttgcccgaccgggtctccaggttctcattcccacctgaaagacctgcatagccatgccagtgtgcccacagctcatccccaggccagaaggcccacaattcatgcctcactccagagggagatgccgctcccaagagctacccctggggtgtcctgggtgccaacttacggccaacatagaggcaggagccagccaggatgctgccgtcacgggcgtggcacacgaggttgtcccccgaccgctgcctggacccattgaggttggccagggccagagccaaggtggaggcgttgagtacacgggagagctcagggggcaggcggcgcccgttgagggtccagtagaggccctcggcggtggctcctggtgggtctccgtgcactgagcaggtggccagcagggaggagccgatgagaagcgtgggatcctggggactgatcacagctgtgtctggggtcaaagaggaacacgtgtcaggccagggcggggaccctccaagcccccaaccatgccaggacctccagggttcatggtggtcctgaaaagacgctgttaatgattgtcccccattttacagatagggaaggtagagatcagttgggttaaatgcccagggcaacactggtggccaaactgacagacctggagttgtccaggtctgtctgactccaacactggatccttccaaaactcttcatcactgacatgcttaaggttctctgaggggtcacacaactcgggcatagaggctcattcggatccaagtgactcttgcttagcacatcgttatgacaaacactatgctttgctttttttttttgagacggagtctcgctctgtcgcccaggctggagtgcagtggcacgatctcggctcactgcaacctccgcctcccgggtccaagcaattcttctgcctcagcctcccgagtagctgggacttcaggtgtgcaccaccatgcctgactaacttttgtatttttttttttttgagacgcagtcttgctctgtcgcccaggctggagtgcagtggcacgatctcggctcactgcaagctccgcctcccgggatcatgccattctcctgcctcagcctcccaagtagctaggactacgcgcccgccaccacgcctggctaattttttgtatttttagtagagacggggtttcagcatgttagccaggatggtctcgatctcctgacctcatgatccatccgtatgggcctcccaaagtgctgggattacaggcgtgagccactgcgcctggccaagttttgtatttttagtagagacggggtttcaccatattggccaggctggtcttgaactcctgacctcgtgatccacctccctcggcctctcaaagtgctgggattacaggagtgagccaatacacccaggcatgctttgctttttatttttttagcgacagggtctcactctgttggccaggctggagtgcagtggcacgatcatagctcactgcagcctcgatctcctgggttcaagtgatcctccctcatctcagctcccaagtagctgggactacaggtgtgcaccaccacacctggctgatttttaaatatttttttagagatgaggtctcgctagtttgctcaggccggtcttgaactcctggcctcaagcgatcctcccaccttggcctcccaaagtcctgggatcacaggcatgagcttcggtgcctagccttctttatttttcattctcattttgtttttcttttttggcaactagaaacaaaagattgtgggttcttcctgtgatgctcccagagcctcacacatagtaggtgtttctgtgggggaagggcactgcttaaaatgaaagccctgacccttacttgaatcattaagagcaccatgttttttttttttttgagacggagttttgctcttgttgcccaggctggagtgcaatggcacgatctcggctcaccgcaatctccgcctcccaggttcaagtgattctcctgcgtcagcctcccgagtagctgggattacaggcacacatcaccgtgcccggctaatttttgtatttttagtagagatgtggtttcaccgtgctggtcaggctggtttcgaactcctgaccttgtgatccgcctgcctcagcctcccaaagtgctgggattacaggggtgaaccaccgcgcccagcctgtatttttagtagagtccaagaatcgccatgttggccaggctggtctcgaactcctgacatcaagtgatccactcgcctcagcctcccgaagtgctgggatgacaggcgtgagtcattgcgcctggcctaacagcaccatttattgagcacttgttgtgttctgaatactgggctaagactacctacattttctcggccaatcctgcttatatgttaaagatgaaaaaactccggctctgaaagatggagtttccttgctggaatgagggaaggccatactagttaggcccagattttctggtctccaaagttctgttccacactgcctacctctggaactaaaggcagccctggcaaactgcacgtccccaactcccatccaaagggacttgacatcatcgctgtttccctccactcagttttcctcatctgcaaagtgagaacgagaaagctctttgtctcctggggtattgtgaaagtcagaggggaaaggacttcctgaaccaggttgtgtgtgagtcaggtactaggcacaggaaacttggggacgcccatgggtggttgatgcctctctctcctgctggccatcagggcagcccaggagttccccttctggagaccagaaccttgtccatagggaaaccaaggcccagaggaggagggggtgcacaggccaacctcccaatgcctctctgagtctcagtttccccatctggaaagtggacatcatggcgtcaatgtcatggggttggctgggtgcggtggctcatgcctgtaatcccagcactttgagaggctgaggtgggaggatcacgtgaggtcaagagtttgagacagcctgggcaacatggtgaaaccctgtctctaccaaaaatacaaaaattagccaggtggggagggggtggtggccccatgcctgtggtcttagctacttgggaggctgaggcaggaggatcgctggagcccgggaagttgaggctgcagtgagccatgactgcaccactgcactccagcctgggtgacagtgagaccctgtctcaaaaaagaaataaaaaatttagatttaaatttataaaaaccaacaaaacaaacctcatgaggttgtttgagaggagtgaaaatattgttggagacaatattttcccatgagatctttaaaccaagttgacctggactcgaatgcccccagcctgactcagtgttctacttttttttttttttgagacagagtctcactctgtcacccaggctggagtgcagtggcacaatctcggctcaccataacctccacacccagctaatttttgtatttttaggagagacggagtttcgccatgttggccaggctggtctcgaactcttgacctccagtgatccacccgccttggcctcccaaagtgctgggatgacaggcgtgagccactgcacccggcctcagtgttttacttctttgagcctctggaaaggggcttctcgttccacacagagtggttgtaaagactcatccacgcctttgttcgttcacgcgttcatctattcattcacagggtacctatagtgtgtccggatctgtgggcactggggtgatgcccaagacacacaaaagtcctgcccttgtgggcatcaaatccaaggaagcagcaggaaaaaggaataaataaatatctaagacaataactaggggagaaagtaaagcaggggctggaggaagacagagcagcggcagaagcttgggaggcctgtctggggaggtgacctttgagcagagacctgaataaagtaagagaagtagctgtgacattatctaacagagcatgtccaggcagtgggagctgcaagtgccaaggtcctggggcagaagcggtgggaaatgaggtttgagaggtcagagaccctgacctgcagggaggagggattccagggttctcagccggggagggagggatgcggtgagatatgcgttaaaaggactccccaggcggctggaagaagggactgcaggaggcaggggcagcccagcttcgcagagatggcagccaaggacagggtgatcctggcccccagggaggccccctgaatgccagcgctgccctgcacttgccctcactgccccagatgggcgaggtggggtggacacggttcttgggccggccctgatgattttccggggcaaacttggctcgagggctctgtctcgctggagcctggaatcgcagttgcgcttggggcttggcccagggctcgccggaggtctccgcgtccgtgcgaaggagccggctgagcgggccagagccgaggaggcgggggcggccgaggggggcggggggctgggggccaggggaccgccctggaggtcccaggcagccagccgcccgctaattcggaattccttttgcatgaactcgggtgtgccagcgtctctgccccggcccacccaccgcttcctgcctgggcccccccaacagagtgggaggcacggccaggcctgcccagaccccaggcccctctcagcccttctagagtgggtctcactcctcctgcccccaccacccgccagcttggcctgggcaggaaggggctctctggggggtcctggctggggggcgctgcccctctgccacacccgcctggcctgggccggcgtggctcacttgccagcagctgcagctgccctcccggggctgggcgggggacaccgggcggcgacgggttgtagggggaaggcaaggccaggcgggcctggacagaccaatctcccacccccttagccccagccggtaaggtcagaaggacactttctcctcccgggatatgggcgcaacaccagtgggagaacctggccaattgacttcccctctccagttctcaattttctcctccataaaatgggaggagaaatacgttctacttgctggggagatcaatgagatgtgattgcaatccaatgtccagagggctcagaagcctgaagcccccaggagctgcaaagatgacagcccctcccagctctggggtcccggctgactaggcactccctccaggcctccacaaacaatgggctaaggcgctggggacagagatgcacgcactccaggccaggcaggggagcagctgggaacagcccactgagccggagttggtgggggcttggcttggtttggagggcctcctagggctccccaaagcagatccctaggttgggcttttgaacagctcccttttcactccctgcctcccctcctttcccgcagagctggggcctttaaaagttttttctctcctcttttcccaatctggagccactgccgttattaaaaaggaacaccatgtgttttaaaagggaaaagtgtgagattctctgcaagcagggcggaagggtggcctccatcccagggtccccacgggggtccccatctcccgtcccgctggtacctgcagacactttacgacccacccgcctgctggtcaggtgctaagacacaccgtaagtagaaacatattgccgaggtgtgagaatcttttatttaatttcttccccccttaaaggaaaaaacacacttacagtgcccccccaccccctacaccttcgcctgctgctctactggctgaaaacaaagcttggcgctcacagtggcactcacaggcgctgcccaccgcctggcagagccgtcaggggccctgggagggcccgaggtagcccctcacctgaaagccaggggagagccaggctttcagcaagtgcccctagaagatgcccggaccctgccccttcccggaggagccctacaggcagcccgcaaacagcccagcacagggtggatgagcctgggagcagtgtgtgcccggcgacccccggggtggcccgtgcgcctggatggggtgcgtggagtgactgaacatctggggcgagtggtgcctgcctctgtgcccctgggtcgcctcccctgtgggatgtgtgtgaccgtgaatgtgtgtgtcggggatggaatgtgtgtgcgtccgcgatggtgcgcgaatgtgcacctgggatgcagtgtgcgcgagtttgagggcgagggtgacgggccacaagccagtgtgattctttgtgtgtctctgggtgtgtcccagagcgggtctgcatacggagacgtatccttgcgggggtgttccttggatggggggccccagagtgcctgaggccagaagtccctccagggcaggggtcttggcccgtagggcagcgggttcccagtgggccccctcaaagtttgggcccgctggtgcccggactcactggctcccgctccctctccctctcacccactcgctcacaaagattcctctcgctggaggctctccgcccgacgcagcctggctgaaaacggttctaagcgccgccggtggcggggactccgcggacccccgtgcgccgggtcccgcagggggagggcggtggcgccggcccgtggagacacaagtcccccgggaccccgggctgcgcgccaggcggccagagcggcccccctgcagccccgccctccccgtggggctcatccctccgcctgggggggcccgctgggggcccgcacccagcgcgccaaccgcgtgcgcccccgcctgggagcggtgccctgcagtcccaggggcccagagtccaccgaagcagacgcgtgcgcccgccacgtcctggcatgcagagggtctcaggccgcgatccccccagcccccgggggcctggcctggcgccctcggcccagctgcccaggtaacagggcctcgggcgcggaagcaggactctctggacagtggactgcggcgccgtgtgccccgcaggtgagggcgccccgagggctgcgccgggggcgccttcctttgttccccggccgtccaggtggcgcccgcgccccctccccccgcggctgcccccggggcgcccgccctctgctctggcaggggggaaggagtggggcgccgggtactcacgggctcctgatccggctcgcggcgccccgaggacgcagagcagcagcagcaggggcagcaacggcggcggccgccgcgcggattgggcggcggggccccggcggccggcgggcatggggccggcgctgccgggggcgcgcggcgggctgcggctcggcggcggtggcgcagggcgcgggacgcaggccgggcgcgggagggcgcgggccaggccgcccgcacgtcgctgggcgcggacgcggaggccggagcaagtctgagcagccgaattgacaaggcgctaatgcgccgctggccccgcccggccccgcccccggcccggcccggccccgggggggcggcgggccccgcaccggcctccccgccgcccgcccgcccgcgggcaccgcgcgccccgcccgtcccgcctccgccccaccgagaaccgcgcgcgccctatcccgcggcccaaagccccctaactcaacccctaccggcccaggacctccctctccaaccctgccagctccaggcttcccacccccagtctgggacccggcacccccaatcccgtttccataaccctgcccacttccctgcaccctcctctcagcccagtgcctcttcagtggcccctttggtccccaaccctgccccactcctccattcccccttccacggcccaatcttctgtctcggcccccaccccagctctggccccgccccccccaccgagcggtccttgagtcccgcctacccccatctccagcccctcagccttcccaggggcctaaaagtcacccccagccccacgccctcggcgcgcgggttccagccctcccacctcatcctgcctcttttcgattctccgcgagtagcctcggccccaggctttgctggaagaaaggagaaaaagcaggaaggcacggagtccctcgccttcgccctggctgcgctgtccccttcgcgcgcgggatgggtttgaggttgctctgggcgccccgggggcctcgggagggagctcctgcgtgggcagacggggagatgtagtcccctgtgggagccgggacccaggcctgcgcgggaactgggtcccgcaccgcagtaagagggattcccaggaggagagcggtaagaagctctttccccgggacctattcacaccccgccacggaaaaatccactcagcggcccgcgggtggggtgcgccacgcggtgagtaatcgcttcggcggccaccgcccgccgactccaggtaacgccggctgcccggagcgacgcatagtttgtcttccttcttttgcgcaaagagccttctccgtgttattatttttggccattgctcgagtttcgggacccctcccggtccgggcgtctcatctccctcctcccggtccccacccgatgcgggcgcccaggaataaagggttcctggcctccaaggctgctgcggatgggggtgcctgaaatgagagttggggggtgcaattacccacttttggtcgcagccccgcccccagctgcagcgcccagggaagggaacggctccaagtccccttttccaggagtcccttagaggcctggattctctctcctggtccccaaccagccaagggggtaaaagtgtctgaggggggctcaggagcccccatttgtctgcccaagactgaagccccaccctctcctacttaaatctccagttcagactccagactgtcaaaaaacaagattgggggatgggagcctataggggcccagggcgcccctgctccatctgaattctggatggagaagacagacaaggagagacgctgccatttacttcgggaaaccaggccttttgtgcctcagtttcttcctctgcacagtgggcaccacccagtctaggagcttctgtgggaagacgcagggcagcagaagtctctacaatccaagcccttagcacagcactggaggatatcctggagcagaggtgacccccagccctgcttgtcccctctgaaacatggagccatagtcccacctgccaggggacccagagggttaagtggaggtggcagtccttggctggaattgagtttttaggatactcaccactactcccccatggctcctgtctgcagatgctctctgtgtggatagagacgcctcactccctcctgggaggacttcaggcttctggagcaaaaccttgattttttcctccctccatttctgcttctcttccagtcattttggttttgggaaagggctctcccatccatccaggtgctcaggccagagacctggaagcgcacgtgacaactctctcctttgctcatccctcatgtccaattcatcagcaaatcctgttggctctgattctaaaacacatctccattctgagatgctgacccctttttcccaccccattcagatccaggccccacggtctccctcagggatgcttcccggcctcctccagggcctccctgataacccttctgcctttctcggcacaccaggcagagggagcttttaaaagaagaaaaagcagatctttgtcctgccaccctctcgccatcctctcccctcctcttcttccctctcctcttccccctcctctccctcattccgccccagccactggagccctgtttcccaaaacataccaggcttgttactatagaagggcctctgcgtgttggctgttccctctgctggaatgctgttccccacatcttccccagttggccctttctcttccatcacttcacaggattagtgccacctcctcagagaggccctccacccttcccccagcactctccctctccttcactttgttttattgtttttgaaacacaactcttccaaccatttcatttcttgtgcaactgattttctttagactgtgggcagcctcagcccctttggaccccagtggtgggcccagtgagggctgaaagcgaagcactcactaaatatttgtaaaagtaaaggatggagaactcttactccctccaagtagcaagaaaactcagtcctagcaagtcatgctgcctggggtcctagcctggcccacactctgtgtcttgctgtgtgaccctagccagtagacatccctctcttgttcttaccaacagaagggaaggaccattttccaatcctgcccagccccaccctggagtgtgacttctgcccttgggtgatctttaccccacacctttgacttcagggaaagggaattgaccccagagtgcatccttcccggcccttagggcccccagaagtttaaccctttactccccagttccattatctccttgaggacaaaagggagctagcgtcaatggaacttctggcaaatattgacccaagtccttgaagttggctgggaatgtgtaaggggcagaaggagggagggcctccccttgggcagagggagggcctccccttgggctgggggagggacccctccttagtcctgcaccctccactccaaggtcacctctggatgagaggtattaggttggggggggggcctccatccccagctccctcgtgattccagggcactgagggtgcaccagggagggggcagtggaaatggcaccttcagggtcctgtggggacccacaaccactgggagtgaggaaggctgagagctgtctctcccattctgaaagccccgtgctcagggctccccagtatgggattagctacctggtgttccaggcaggtgctttcaggaattaaggggcagtgagggtctggacacctggttcagggtctgtggcacaggaaagtggggcccgtgtgtacctaggctttataatttctgccctggaggctgagcctggggagaagcaatgcctgggtgctcagtgtaatgcacactggacttcaggcactggaggcgggacctggggagttgcagacctgcctaggggacctgcctgggaagttgcaggcctgccccagggaggccagtttccctgcccgtctgtaccctgagaagcctctgaagtctgggtcccaggaggcaccagctgctttagggggacagccacatccctccgtcctcccccaacaaccctcagcaaccaccaccggcgccatggtgctctgcctcctccctggcctgtaccctgcttggaggtgggggtcagcagggtcgtggtgagggcggcaagggacaaagggtgcttgtccgctgcccgccttgacctcggctgctgtggcttcccggacgcctggcctgccgctgattcacgcccaggccggcctcagcgccccccgcctgccgcccccagccaggccgccccggggggtaggaagtgggggggggggcgagggcggcgccgagtcaactttccctcttaagccccgaaggaatgtcggcggatttcctgaaacccgaccctggccgcccgccggccctcccgcccctcacctggaccggctcccccgggaacagcaggaggggcgcgggggctcaccttgggggccggggtcaagtcctctttccgctcacccccccagcggcctagtgcagcggaaagggggctgggtgtgcggcaatcagcctctttcccttctcccctcaggcgacctgggtgatcgacccactcctccagcctcagtttctccttctgcaaaagggcgcggggtgtccctcctccctgatgcgttttaagcaatgcccaaaggtcacctcccatcattggcagggctctgccggcttttctttgcttctctccctgtcacctggacagaaccactttgcagtctgagcatcagtttcctcacccatataaaagggcaacgctaccggtacctgtcttatacggttgttgcaagaaaaagtgtttcgttggaatgaatgaaagacagtaattgtggaggggttaggcgcgcgcgggcctctggaattagcatgtgtgggcttgaatcctgactttgccaacgcgtcccggagcctaagtttcccacctgtgaaatgggggacagtattggtcataacgcacagggctgtttcccaaggtgcgggcctggcgcgcgggtgggttagaagcggaattctcctgctggattctggcgcaaactgcgggctggaggccctcgccgccgggtcgcagcggcctagcatgggaggggaggggaggggcggggcggggcgggggaggggccgcaccgggatccagatgttcggggtccgccaggcacagccgcgcctgattaagccacgtgggggccggccgggggccgctgagatgaaagcgcggccgcaggccagagtagggggtgcgccgggcccccacccgggacaccctcttcccaggccgaaacctgagccgccctctaacccgcagaccctgcgaggctgccgccccgtctgcgggggcggagcgtaggtgggggacctgcgggctgctgcgcggcgctgcaggcacctgcgccaggcatgccagcgaaagcgggggcatctttgcagaggatccgggtttagaggggcgtccccactcccttatctggcggagaggaagctgggggtaccctctaaccgagattcggctcctggggctacagtccatcgccctggggtgtgatggttatggaagtcagaagtgtcgctatttgccccgttttcccatgagaattagacatgtcagcatcaccccctccccttgctcctgagcatacctctgtgtcccctcccactaagccccagcccaggggtctccagccttggggagacagggccagattccctaggtcagtggatcagggctgggccagagggaggcgaggctgaaggagcaagggaggggctcagagggcttcccggaggaggcaaactgcgcgcaagttgtctcctttctaacctgggtgtcaaaagagaagatgccaggactcagctgccgggtcctgcggctctcaccttcctccctctccgttccctggttggactccagccccatcgccctccctcctcctgcaacaagctctttctctcaggatcctcgctgatccttgtagcctggacacccctttctcctctctcccgcgtggtcggctcacacgtcgcctcctccgccaagctctccgctctcctcgacacccctggggaatagtcccctccatcccatccccctatatatttccttttggccccaagcgccagcagagatcccccgcccgtgggcaccagggaggtgtcctgggacccccgcgatgggatagacggtgggggccgcgatgcacctgccccgcccgacccgcacgcctcgggtgccgcagcgcagctaccccgcccgctctccgcatctcccaccccccgcttcccaggctgcctcgctcgggtgacgtcagcgccccggtccccgccgcagccgctgcatcctccgtgcccggcctgagctggagtcccccgcgccccccgcgttccgcccggccatggctgcggtggcgctgatgccaccgccgctgctgctgctgctgctgttggcgtcgccgcccgccgcctccgcgccgtccgcccgcgatcccttcgccccccagctcggggacacgcagaactgccagctgcggtgccgcgaccgcgacctcggcccgcagccctcgcaggtgaggcgcgtgcggtgccaggtgccagcgggggacgcgggatctctccgaaggaggaggcgttgggatgggcttctcttggatgacagcaggagactttggtgggggtgtccgtggggaggtgggggtcgggaatggggagatctctccagtagttgacgggctggggttccctctgatgggggagtgcttggggatgcaggtccttgcgataaggggccgataccacctcccgggctccttccgcactctgctgggtaaggaccctctagcacccaacccccagctccctcaggcctgatggtccccccacctcattcctcctcctccacatcgtgttccctccccactcagagctaccagcccctactcataccaccactccccaggattcaagcctgatctgcgtgtgaccaaaaccccctcctctgagcctccccctcctcctccaggtctgagaatccttctccatgtctcccctcctccctggaacctagtggggggaaggctcatttctctccaccttcactgtccatttctcttctcaagctccctccccatctccctcctcagagctaagagcccccactaatatttgtagcctctcccaacttcatctccatctggctagatgtcgtggggagcggggaagcctttccctgcctctgctgaatgctccggtccccccaccctcctcctgcccctccccatggcctgagccccctgtcctcccctcccccaggcggggctggagggcgcctccgagtctccctatgacagagccgttctgatcagcgcttgcgagcgtggctgccgcctcttctccatctgccgatttgtggccagaagctccaagcccaatgccacccaaactgagtgtgaagcaggtgagggcccgccggcagggtgggccagcgtggggagaggtggcctgggaagggccgtccccagtcacccgctcccacctcccacagcctgcgtggaagcctatgtgaaggaggcagagcagcaggcctgtagccacggctgctggagccagcccgcggagcctgagccggagcagaaggtgggcctcccactgcggcctggggtcccttttcccaatacccccaccctcttcaccccgtgggaaatcttcattcacgtgcagaggctctgccagactctgcgttctataccaggcctgcagggcaacctccatccagccccgtcatgtctccagccttagttacatgcaacaacgccccccatgccccaccaccttttcaggaataagtggcagaaaacagccatcatttatcaaacatctgtcctggttcgggcctgacttcaacctgtcccaaatgtttttgtgtcacttggaggcacaaaggacaatgtcacccccatttagtgcccagggggcaacctcccaggtcatacacagggctgtgcaaggggcgagatttgaagccaccagagctgtggccactcctcacctcactcctcttaggcgcccccagagctgccaggtgctggtctaagcccttcccctgtgatgagctggtggtcactgtcacctggaggggctcagaactgcggctcagggtagagcaggcttgcctcgcaagcacgcacacactgccttatgggagaaataataacggttcatctattgtagtccaagcaatgctgcatcatggggaaactgaggcacagaaaatcatgtagcatagccagagacctaggggctgggactccccagaaagccctttccccacttcccccattttcctccaccccttcccagctttcactgctgttcagaaaagctcactgcactgtcagcccttccaattcagagctccctcttatttatttatttattttttgagatgaagtcttgctctgttgcctagcctggagtgcagtggtacaatcttggctcactgcagcctccgcctcccgggttcaagtggttctcctgcctcagcctcctttgtaggtgagattacaggcaccccccactacaatcggctaatttttgtatttttaggagagacagggtttcatcatgttggccaggctgatcttgaactcctgacctcaagtgatcttcccacgtcggcctcccaaagtgctgggattacaggcatgagccaccatggccggccatcagacctccgtcttgacgctgtcaaaataagaataatgaggatgatgatatttttagtaatagggactactacgcattaagtgcctgtgccgtgccaggcacctggcaggcatcctctagttgaaatttcatggctactccatgaaggaagagaacgatacccattttagggctcagagagcacaatccacttccctaagggtacacaggaagccaactgccacgctgagatctgtgttcactataagaagtcctattggcccaaatcacttagccacatccaatccaagtgaattctcctagctcctctcctgttagtttatttattcatttatttatttgagatggagtctcactctttcacccaggctagagttcagtggtgtgatcttggctcactgcaacctctgcctcctgggttcaagcaaatctcctgcctcagcctctggagtagctgagattccaggcgtgcgccatcatgcctggctaatttttgtatttttagtagagacagggtttcacgatgttgtccaggctggtctcaaacttctggcctcaagtgatcggcctgcctcagccttccaaagtgttgggattacaggcgtgagccaccacatcctgccccctcccattcattggttaatgccctatttcggtgccatctttgtgtcttggaccttttttcaccagagaaaggtcctggaggctccaagtggggccctctccctcttggacttgttttccaccctctgcaatgaccttgtcaactcagcccagggatttgtctcctccacctggacatactacttgcagactgacaatgggaaagtggtggtgtttcaggtgagacctctgacaggggccacgccagagtggcagatgggtgggcagggtaagaagatgggatgcattggctcttagctcatgagatgcaaagtccacagtgggcgagcttcaggcacagctggatccaggggctcagtgtctcactccatgccttgactctgctttcttttgtggtggcttcattcccaggcatttacttcttcttggcagtaaggtggatgccagaggctctaggttacaaacgctgtggtttttttttgttgttgttgttgttgttttgagatggactcccattcttgttgcccaagatggagtgcaatggcatgatcttagctcactgcaacctccacctcccaggttcaagtgattctcctgcttcagcctcctgagtagctgggattacaggcggccaccaccacacccacctaatttttgtatttttagtggagacggggtttcgccatgttggccaggctggtctcgaactcctgacctcaggtgtttcacctgcctcggcctcccaaagtgctgggattacaggcatgagccactgccccggctccctctggggttttaactgagctgggatttactctgattggccctggctggatcatatgaccatctctcaggcaattcactggcttggtctggatcatgttcctacttctggagctaaaggatggggttaaggcaaatggaggagcccatgaaagcagaaaacaacatccctgacatcaagcccacccctgatacccaggggaactgggtatcagctgggcgtgggacatggcagtcacagagggcctgcctgggcccaggggtgctgttctcacaagcctctctgtgctgtcttgttcctggcccagactcagcccatagtggagagcctcggcttccaggggggccgtctgcagcgcgtggaggtgacctggcgaggctcccaccctgaagccctggaggtgcacgtgggtaaggtgcaacctagaccagtgttccttccatgggtggccccactgccacaaggagtcggcctggcaaacagaccttctaggatcgggatctccatctctcaagtcctgggttccatggctcatcccccaggtctccatggtctatttcccagggttccatggtccacctcccagggttccatggtccacttctcagggttccgtggtctacttcccagggttccgtggtccatctccccgggttccatggtctatttaccagggatccgtggtccacctctcagggttccgtggcccacctcccgggttccgtggccacctcccagggttccgtgttccgcctcccagcgttctgtggtccacctcccagggatccatggttcactttccagggttctgtggcccatctccctgggttctgtggcccatctcccagggttccatggttcatctctcagagttccatgggttcatctcctagggtcatctcctagggtccatctccaagggttctttggtccatctctcagggttccatggttcatctcttaggattctgcagttcatctcccagggttctgtggcccatcccccagggttctgcagtccatctcccagggttccatggtccatttcccagggttccatgttccatctcccagggttccatgttccatctcccagggttccatgggttcatctcctaagggtcatctcctaggatccatctcccagggttccatgggttcatcttctagggtcatctcctagggtccatctcctagagttctttggtctatctctcagggttccatggttcatctcctaggattctgcagttcacccccagggttgcatggttcatctcctaggatccatctcccagggttccatggtccctgtctcagcattctgtggtccatctcccagggctctgatctccattccaggactctatgccccaggtcctgacctcctccctcctggtcatggttattgtggcctcttagcaaagacctggtggtcgctgagtggcagctgatctctcagaccctgtaggccccctggacaaggtgaggaaggccaagatccgagtcaagaccagcagcaaggccaaggtggagtctgaagagccacaggacaatgacttcctcagttgcatgtcccggtgggtggcaggaccttgggggtgggaggggggtgggactggaggtacgggtctccctggtcccggcctgggcagctgagtggtgcctgccgggcggggcaggcgctcgggtctgcctcgctggatcctggcctgctgcctcttcctctccgtgctggtgatgctgtggctgagctgctccaccctggtgaccgcgcctggccagcacctcaagttccaggtgggtgggatctgtgaatggcgctgggccgagggagggggtgaaggcagagagagctgtttgctggtcctggatttggccacctgctcccatggaggccaggacctcagacatttttttcttttttcatgtatatacatatatatacatatacgtgtgtgtgtgtgtgtgtgtgtgtgtgtatatatatatatataatatatatatatatattttttttgagatggagtcttgctctgtcacctgggctggagtgcaatggcaccatctcggctcactgcaacctccacctcctgggttcaagcaattctcctgcctcagcctccgaagtagctgggactatgggcgcgggccaccacacccagctaatttttgtatttttagtagagacggtgtttcaccatgttggccaggctggtcttgaactcctgacctcaggtgatccatccgcctctgcctcccaaagtgctgggattacaggcgtgacccaccgcgcccggcctatatatatatttttgagacaggatctcactctttcacccaggatggagtgcagtggcatgatcacagctcactgcagcctcggcctccctggctcaagcaatcctcctgcctcagcctcctgagtagctgggaccacagtcacgtgccaccatgccccgctaatttttgtattttttgtagagatggggactatgttgcccaggctggtcttgaactcctgggctcaagtgatccacctgccttgccctcccagaataccgggattacaggcatgagccacctcacccagccaggacctcacacttgctgcatgacttgggccagtttcttcactgccctttgaattggtgggaagaaaatccactcttagttggggcgacatgaagtcagaggtggccacacttctgtggtgttggcctcacctctatcatgcccaggtgtgttggtgacacctctgtggtgcccagagcctgggcaacatagtgaaaccttgtcactacaaatcatttaaaaattagctagatgtggctgggcatggtggcccatgcctgtaatcccagcactttgggaggccgaggtgggcggatcacgaggtcaagagattgagaccatcctggctaacaaggtgaaaccccatctctactaaaaatacaaaaaattagctgggcgtggtggcaggtgcctgtagtcccagctactcgggaggctgaggcaggagaatggcgtgaacccaggaggaggagcttgcagtgagccgagatcgcgccactgcactccagcctgggtgacagagcgagactccatctcaaaaaaaaaaaaaagaaaaaaaaaattagctagacgtggaggtgcatgtttatgatcccagctacttaggaagctgaggtgggaggatcacttgagcctgagagttcgaagctgcagtgagctgtgatggcaccactatactccagcctggacaacagagaagaccccatcacacacacacacacacacacacacacacacacacacacacacacacaaaagtccaggtgtggtggctcacacctgtaattccagcactttgggaggctgaggtgggcagatcacttcaggagttcgagaccagcctagccaacatagtgaaaccccatatctactaataatacaaaaattagctgggcgtggtggcgtgcacctgtagtcccagctacttgggaggctgagaaaggagaatcgcttgaacctaggaggcggaggttgcagtgagctgagatggcgccactgcactccagcctgggtgacagagagagactctctcaaaaaaagaaaaaaaataaaacaatcagaggtgggaaggagacagtcagggttgggggctcggcctctccccgtccctccacttccctcctcccctctcttcctgcagcctctgaccctggagcagcacaagggcttcatgatggagcccgattggcccctgtacccgccgccgtcccacgcctgtgaggacagcctaccaccctacaagctgaagctggacctgaccaagctgtaggcctccactggccccatcactgccaactgcagggggcccctcgggcctcacttgccctgagcccaggagtccaagggcagggtgggtccagccttgagcccctccacccccaaatccttcctctcctcccagtcccaccccttgccccacggagtcctggggacgcagtgccccagctgggaagagggcgggatcgggcactggttcctccttgtccccgctttcttgggggcttgctactttttgtcttctattgtgtggctttctgagtatttgaaccccagtcctgtgtcaccttcctttttccttctatgtcccctctctgcggggggggcgctgaggctgagggggagctgcgtcttgctagggcttcccccttctccccatcccggtctccagagacccagcttctgagagacagggtgtgggcatctccatgcccctataaagcgtgcctggggcttgtctggggctggggaggaataaaccatgtatataaaagagtttcaggctgagcctgcttctgttcggttgtctgtctgcccttggggtgtggcccacgcatggctatgacccctgccgagcaggatctttctgacatgggaaagccctggaaacccaggtggcaccaggcactgaaagtagctgcctctcagaaggacactccctctggtctaacccaggtcacactcccagctacagatgtccctggaaaactgactcgaggccaggcgcagcagctcatgcctgtaatcccagcactttaggagactgaggcaggagattcactggagcccagaagttccagaccggcctggggcaacatagcaaggccccatctctacaaaatacacacacacacacacacacacacacacacacacatatatatatataattaactgggtgtggtggcttgagcctgtggtcccagctactcgggaggctgaggtgggaggattgcttgaggcggggaggtggaggctgcagtgagctatgattgcaccactgaactccagcctgggtgacagagcatgactctgtctcaaaaaaaaaaaaaaaaaaaagtggcttgtgccacccatctgactggggcagttcagcgtcccttcctgtgcctgatgtccctgttatgaagggacaaattgcatcttgaagaggacttgattttgtagccacctggcttccggtctactttttctttttcttttttgagacagagtctcgctctgtcgcccaggctggagtgcagtggtgcggtctcagctcactgcaaactccgcctcccaggttccagtgattctcttgcctcagcctccaagtaggtgggattataggcgcgtgccaccatgcgcggctactttttgtattttcagtagagacgcagtttcaccatgttggccaggctggtcttgaactcctgaccttaaataatctgcccacctcagcctcccaaagtgctgggattacaggcatgagcctctgcacccagccagctttatttatttattttttaaaaaatgagataggctcggccgggcacagtggctcatgcctgtaatcctagcactttgggaggccgaggcgggcagatcacgaggtcaggagattgagaccattctgggtaacatggtgaaaccctgtctctactaaaaatacaaaaaaaaattagctgggcatggtggtgggcgcctgtagtcccagctactcaggaggctaaggcaggagaacggcgtgaacctgggaggcaaagcttgcagtgagcagagatcacgccactgccctgcagcctgggcgacagagcgagactctgtctcaaaaacaaaacaaaacaaaacaaaaaatgagacagggtcttacgctgtcaccgaggctggagtgcagtggtgtgatcacagctcactgcagcctccacctcccaggctcaagccatcctcccatctcagcctcttgactgcaggaagggagccacgcccttccgttcctgtctgttctgcagactcctccagattcttcttgtaactccgctttgagattcagttgacttgagttggtttctgttgctcgaaaccagagattcctgactgatacagggcctcatcccctgggcagagctcaggatcaggagcatgatggccccagcctacaggcaatggggtggagagtcccaggaattccaggctgatggagtgacagtgggtctgcaggttggggcagaaaattaaatgatgcctcctggggctgtgtgtaagactctccacccttcactctaccctggatcctggaaggttgatccacttggaccctcttctttccactggagtcagtcagagggaccactggcaggagatgagaggagggaggagtcaaggtctttcctggtgtccttcccagcatcccctgactcaagaccacaactcgaccaagcagcctcccctggagatcttcaagagctctggaggggcggggcgcagtgactcatgcctgtaatcccagtactttaggaggcagaggagggtggatcaactgaagtcaggggttcaagaccagcctggccaacgtggcgaaattcccgtctctacaaaaatacaaaaattagctaggcatggtggcgcactcctataatcccagctactcgggaggctgaggcaggagaatcacttgaaccctggaggcagaggttgcagtgagccaagactgcaccattgcactccagcctggacaacaagggcgaaactctgtctcaaaaaaaaaaaaaaaaaagaaaaaaaagggccccttggccgggtgtggtggctcatgcctgtaatcccaggactttggaagtctgaggcgggaggatcacttgagtgtaggagtttgagacaaatctggggaatatagcaagattcatctctacaagaaatttaaaaatttagccagacctggtggtgggcaccagtaatctcagctgctgagctgaagctgaggtggagggatcacttgagcccaggaagacaaggctgcagtgagccatgattgcactaatgcactccagcgtggctgagaagagtgagaccatttccaaaaaaataaatagataaatcaaaataaaaggctgggctcggtggctcatgcttgtaatcccagcaatttgggagggtgaggcggaaggattacttgatgccaggagcttgagaccagcctggccaacatggtgaaaccccgttcctactaaaaatacaaaaaattagctgggcgtggtggcccatgtctgtaatcccggatatttgggaggctaaggcatgagaatccttcaacctgggaggcggaggttggagtgagccgagatcatgctactacactgcagcctgggcgaaagagtgaggcactgtctcaaataatagcaataatagcccgggcacggtagctcccacctgtaatcccagcactttgggaagctgaggcgggtggattgcctgagctcaggagttcacaaccaacctgggcaacatggtgaaaccctgtctctactgaaatacaaaaaatttgccaggcgtggcagtgtgtgcctgtagacccagctacttactcaggaggctgaggcaggagaattgcttgaacccaggaggcaaaggttgcagtgagctgggatcatgcactgcactcctgcctgggagacagagcaagactctgtctcaaataaataaatacaataataataattgttcctttaggccaggcagggtggctcacatctgtaatcccagctcttcgataggcccaggtgggaggatcgcttgagcccaggagttcaatgttacagtgagttatgatcatgcctaggtgacagagtgggactgtggttcaaaaaatacatgtatagcccatttatgtatgtatgtatgtatgtatgtatgtatgtatgtatgtatgtatgtattttgagacggagtctcgctctgttgcccaggctggagtgcagtggtacgatcttggctcactgcaacctccatcccctcggttcaagtgattcttcgacctcagcctactgagtagctgggattacaggtgcataccaccacgcccggctaatttttgtatttttattagagccaggctttcaccatgttggccaggctggtcttgaactcctgacttcaggtaatccgttagcctcggcctcccaaccactttatttattaatctattttgagacagagtcccactttgtcgcttaggctggagtgcagtggcgagatctgggctcactgcaacgtctacctcccaggtttaagtgattctcctgcctcagcctcccaagtagctgggattacaggtgcaagccaccatacctggctaatttttgtatttttactagagacggggttttgccatgttggccaggccggtctcgaactcctgacctcaagtgatccgcctggtaccatgaccatcaggattcaacccagatgtaatatgggccccagggagtatcattctgggccctgtgtggggtttcaggaaaacctctaggaatgttgcccagaaataagacatgggcagaggtgagaagagaatgacagccagccgttctctttggtagaactttctttgatgatagaaacgttatgtctgcactactcccagccacctggaagttactgagcacttccaacatggctagtgtaactgacaaattgtgtttcttattttgtttagtttgagttgatgtacatgtaagatttttccggctgggcacggtggttcacagctataatcccagcactttgggaggctgaggcaggaggatcacttgagcccaagagttcaagaccagcctgggcaacatggtgaggcacctgtcttctttttttgagactgagtctcacactgtcgcccaggctggtgggcagtggcgcgatctcagctcacaccaaccttcgcttcccaggttcaagcgattctcttgcctcagccttccgagtagctgggagctgggattacagtcacttgccaccacgcccagctaatttttgtattgttttattagagatggggttccgccatgttgactaggctggtcttgaactcctgacatccggtgatctgcccacctcggcctcccaaagtgctgggattacagcgtgagccactgcacccagctgaggcacccgtctttatttaaaaaaaaaaaagaaattgaccagttgtgggggcatgtgcctctagtcccagctactaaggtggctgaggtgggaggattgcttgagactaggagtttgacactagctcgggcaacatagcaagaccctttctctaaaacaattttttaggccagatgcaggcaacaaagtgaagccctgtctctacaaaaaatatacgtatatacaaaattagccaggtattatggcggctgcctgtagtcccagctactcccagatacttggaaggttaaggaggaaggattgcttgagcctggggaggttgaggctgcagtgagctgtgactgcaccaccgcataccagcctgggtgacagagtaagatcctgtctctgacatgacatcatgcctggctaattttttaatttttttttgagacagagtctctctgttgcccaggctggagtgcagtggcacgatctcggctcactgcaacctctgcctcctggtgtcaagcaattcttctgtcccagcctcccgagtatctgggattacaccacgccaggctaatttttgtattttgttagtagacatgggattctgccatgttggctaggctggtcttgaactcctgaactcaggtgatccactagccttagcctcccaaagtgctgggattacaggcgtgagccaccatgtccagcctattttttgattttttatagagatgaggactcattatgtcgctcaggctggtcttgcactcctggacttaagtgatcttcctgcctcggtctcccaaagtgctgggattacaggcgtgagccaccatgcctggtcaaaatttgccattttcatgagttttgagtgcattaattgcatccacaatgttgtgcagccatacctgccatggattttttttaaattgttattgtttttgagacagagtcttgctctgttgcccaggctggagtgcagtggtgcaatcttggctcactgcaacctccgcctcccaggttccggtgattctcctgcctcagcctcccaggtagctgagattacagacatccaccaccacaccgggctaatttttgtatttttagtagacggggtttcaccctgttggccaagctgctgttgaactcctgacctctctcagccttccaaagtgctgggattacaggcatgagccactgcggccggccctgctgtggatttaaatggctactgtcactggtcagcccagtttgaaagggacttcatatggactcactctgtctccttgcctggcccccagtttctcttcttagtggctctagacatctgggctgcatcttgattcttaactgtcctcacctcacttcattccatcagcacagcttgtcccctaggcctccaaagcatacctccagcccacaagcatctctttgtctccatggcaaccaccgaagtccaagctgccactgcctctcactcagcaatggtgcccacctcctcctcttggggcttccggcctctccagttgccctctggttccatcttggataaagcaaatctgaccccagactccacacctttctggggtttactgttgtcttgaggagcccaaacattcccagacagcagagattcccacgatcgggtctcactaacactaacctaacatctccaagcgcttttttttttttctgagatggagtttcactctgtcgcccaggctagagtgcagtggcgtgatctccgctcactgcaagctctgcctcctgggttcacgccattctcctgcctcagcctcccgagtagctgggactacaggcgcccgccaccacgcccggctaatttttttttgtatttttagtagagacagggtttcactgtgttcaccaggatggtctcgatctcctgactttgtgatccacccacctcggcctcccaaagtgctgggattacaggtgtgagccactgcacccggccatcaccaagcgcttctgtgaggctctgcccctcactccctctgctctggcggctgcgtgaggttctctctggatttcttgagcctaccttgttccttccagccccagggcctttgcacatgcagtcccctctgccaggagcacactcctggtcctgcttcaccaagttctcagccacgtcagcatcccctgggatccccatgtttcacttcctgtccatcttccctgctctgatgacattcgtcgttgattaaaaattatttgttggctgagggcagtggcacatgcctgtaattccagcactttaggaggctgaggtgggcagatcacctgaggtcaggagttagagactagcctggccaacatggtgaaaccctgtctctactaaaaatacaaaaattagccaggcatggtggcacgtgcctgtagtctcagctactcgggaggctgaggcaggagaatctcttgaacccggtaggcagaggttgcagtgagccgagatcatgccactgcagtccagcctgggcaacagagcaagactctgtcttaaaataaatacataaataaaaataaaaataatggaggccaggcatggtggctcacacctatagtcccagctctctgggaggctgaggcaggtggatggcttgaggtcaggagttcgagaccagcctggccaacatgacgaaatcctgtctctactaaaaatacaaaaattacctgcgtgtggtggctcaggcctgtaatcccagctactcaggaggttgaggggggataacctaattctcctgctcacctatgaagagcttttgatctttgccagcctggcagccacctctcctgtgccatccctcctgccttttggtcttggagaccaaaatgcgcttgtcctcattttgaatcaatggtctggccttggggccttttctgcagcttccctttgctttgcaatgctgttacggacttggtaggcatctacccagcacctgcagtcttccttcttccttcgttttatttgtttgatttttgttgtttcatctgtcgtccaggctggagtgcagtggcgcaatcttggctcaccacaacctccgcctgtcggattcaagtgattcttctgcctcagcctcccaagtagctggaattacaggtgtccaccaccacgcccggctaattttttgtatttttagtagagacaaggtttcaccatgttggccaggctagtcttaaactcctgacttcatgatctatccacctcagcctcccaaagtgctgggattacaggcgtgagccactgtgctcagcctatttacttctttatgggttcatcttctgcctcctacatcactcaagactgggctcactgggagggcagggctgcatcggctgtgaccccagtacccatcaacgcaggtcacagaggaatgacccaacaagggtgtctgggatggctgggaaagaaccccgcttgccatgcagaggccttggggctgctctgcccagtaaccaaccccttaccctatcctgactctcaggagagaaaggcctctttgaccacgtagctgaagaccagactcaccacagctctgtctctgagcttcaatttcctcttctgtcctagagccctgcccctccctccattttcatcctgagctgcacacagacctggtagtgggtgggtgggtggctggcgtcatggcaacggtagcacagggttgccacagcaacttggttccctagtgacaggcctgagtttcttagcccaggggtggcaatccgccaggaagaaatggggagagggtgtccccagcatccagctggcacacaggggacattctgtaaacacttggagggcaggatggggatgcatggtggctgtcttttcctggggtgcgaagaggagacttcaggtccctgttgggctccatgcagctcctggcacactctccctcctcagggcccccatgcaggctgttccctccgcctggaggctgttccctcttcgctccgtctggccagctcttcagcctgacctcctggctcagccccagcttttatcatggtgacaattaagtgatggcttgtttgcttgtgtgatgattggtttaataaatgttccctctgccagatgctatgcgctaggcgtctcggtcacagctgtgtcccacacaccaaggaggctgctctcaatacatctttgtcgacactctccatccttgctccgccttgcccacttcttccaagccagtgcggcctcatctctatcccttgagctttttctggcactgggcttaggtccttcatattatgtcctctcagaatatacgggaacattgcacaatgttctggaatgtcctggaacattctagaacattctgtccccttcttttactgaagctgggacatcatcacctcttcagggaggctctccctgatcttctggctgaagcagtgctcccctacccaacacacacttgatcgctctcagctcattgccttcaaggcagttattgccatctgaaatggccttggtcattgatcaattatatatctcagatttgtctttcccatcagaatgtacctttcagaatatcttggaacatgaggtcaaggatcttgtcggatgggctgacagttgaatccccagcagcctctcagcaccctagtccccacagtggtgggtcccagttggtcgccccccagaggtagtcctagttcttatcacattgggtggatttgaccttttctttttttttctattgggatgggatccctctatgttgccacggctggtcttaaactcctggactcaagtgatcctcctgcctcggcctcccaaagtgctgggattacagtcttgagccaccgcaactggcctgattttgttttagtaaatcagctttttttttttttttttttttttgaggcagagtctcactctgtcacccaggctggagtgcaatggcttggctcactgcaagctccgcctcctgggttcacaccattctcctgcctcagcctcccaagtagctgggactacaggtgcccgccactacacccggctaattttttgtatttttagtagagacggggtttcaccgtgttagtcaggatggtctcgatctcctgaccttgtgatccacacaccttggcctcccaaagtgctgggattacaggcgtgagccaccgcgcccagccttagtaaaccagctttaataagacataatttacatccaatggcacatccatgttaaatgcccagttcaatgagttttggcaaatgtaatcctcctaagatacccctataatcaagatatacactaggtatggtggctcacacctgtgatcccagcactttgggaggctgaagtgggagaatcacttgaggcctggagttcaagaccagcctgaacaatatagtgagactctgtctctaccaaattttttttacaaaattagccaggtgtactggcatacacctgtggtcccagctactctggaggctgaggtacgaggctcatttgacccaggaggttgaggctgcagtgagctatgattgcgccactgcatttcagcctgggcgacagagtgagaccttatctctaaaaatataaataaataaataaaagggcccggcgtggtggctcatgcttgtaatcccagcactttaggaggctgaggtggacagattgcttgagctcagaagctcaagaccagcctgggcaacatggtgaaacctcaactctacaaaaaaaaaaaaatgcaaaaattagctgggcgtggtggcgcacacctgtggtctcagctactcgggagactgaggtaggaggatcacttgagcccaggaagtcaaggctgcagtgaactgaggttgcaccactgcactctgggtgacagagtgagaccctgtctcaaaaaaataaataaataaaaataaaataataaaattagaaaggcatggtggcatatgccttatagttctagctactcaggaagctgaggagggagcatggcttgagcccaggaattggaggttacagtcagctatgatcgtgccactgcactccagcctaggtgacagagcgagacgaagaccctgtctttcttttttttgagccagagttttgctcttgttgcccaagctggagtgcaatggcatgatctcggctcactgaaacctccgactcctgggttcaagccattctcctgcctcagcctcccgagtagctgggattacaggcatgtgccaccacgcccggctaattttgtatatttatttatttattttatttttatttttatttttattttttttgagacagagtctcgctctgtcacccaggctggagtgcagtggtgcgatctgggctcgctgcaagctccgcctcccgggttcacgccattcttctgcctcagcctcccaagtagctgggactatgggctcccaccaccacgcctggctaattttttttgtattttttagtagagacggggtttcaccatgttagccacgatggtctcgatctcctgacctcgtgatctgcccgcctcggcctctcaaagtgctgggattacaggcgtgagccaccacgcccggccaattttgtatttttattagagatgaggtttctccatgttggtcaggctggtctcaaactcccgacctcaggtgatccgcccgccttggcctcccaaagtgctgggattacaggcgtaagccaccgcacctggccaagaccctgtcttttaagaaaatggataaataaaacataaaaaaagaaggtagccagtcgaggtggctcgtgcctgtaatcccagtactttgggaggccgaagtgggcggatcacctgaggttgggagtttgagaccagcctggccaacatgatgaaatgctgtctctgctaaaaatacaaaaatcagccaggcctggtggtgggcaactgtaattccagagacttgggagggtgaggcaggagaatcgcttgaacccgggaggtggaggttgcagtgatatgagatcgcgccactgcactccagcctgggcgacagagtgagactctgtctcaaaaaaacaaaacaaaacaaaaacaacaacaaaaatttaaataaataaataaaacataaaaaaagaaggtggggccagtgcagacatgacttcaaggaggtgcgggaggctgctggctggggtaacagagagagatcatggtgtttgtcagcaagcctcactcatgatcctgaaaggatgtgccgcctccattaaaaaaaaatttagggccaggcgcagtggctcacgcctgtaatcccaacactttgggaggctgaggtgggtgaatcgtctgagtcaggaatccaagaccagcctggccaacatggtgaaaccctgtctctactaaaaatacaaaaattagccaggcgtggtagtgcatgcctgtaatcccggctacttgggaggctgaggcaggagaattgcttgaacctcggaggcggaggttgcggtgagccaagattgtgccattacactccagcctggtgacagagcgagactctgtctcaaaaaaaaaaaaaaaaggtaaaacacagagtttgttagataggagaaaaatcaaacaggactgaggacagggagttgatgtcgggggaccttgggcttgccccaggaccactccgtggtgactgcctgatggggcagacactgtccccagcctaaaaccacaggaacttgaagccctcccccaaggcttcactttcctcctccataacacctggggattgtaagggaggcctccaagctctgacctgagggtgtgagccctgcagctggtctgaagtgggagagcaggtggcgcgggccctgcctctaggagagccgtgccagctgtgggccagatggtggccaggcccgtggatgctgcctgctatgtccctgcctgccggctctgctagaccacaggtcatcattactggatgaggcgtgtgcagtcaccggcgtgggccctccaggtcctccacttgtctctgctccatgccagtgatagtggcctctagagctcaggccaacagctctggcagaggtcactggcctcactctgcctcactcgacatcccatctgttccatctctttttggtcccacctgcaaagtgcatctcaactaggactacctcccacccctccatgtctgtcaccctgggatgagccctacccatttttccctggattatatgcctcctgactcatgtcccaaattcaagatattgtcccccagttgtcagacactgttgaacagtcagacactgtaacactgttaaattgacactgttaaaaccaatgtcagctgggtgcagtggttcacgctataatcctggcactttgggaggctgaggcgggcagatcacttgaggtcaggagttcgagaccagcctggccaacatggtgaaaccccgtctctaataaaaatacaaaaattatgctgggcacagtggttcactcctgtaatcccagcactttgggaggccaaggcaggtggatcacttgaggtcaggagtttgagaccagcctgtccaacatggtgaaaccatctcaactaaaaatacaaaaattggctgggcgtggtggcacatgcctgtagtcccagctactcgggaggctgaggcaggagaatcacttgaacctgggaggcgaagattgcagtgagctgagattgtgccacggcactccagcctgggtgacagagtgagactccatctcaaaaaaaaaaaaaaaattagccaggcatgtggtacatgcctgtagtcccagctactcaggaggctgaggcaggagaatggcttgaacccaggaggcggaggttgcagtgagctgagatcgcaccactgcactccagggtgggccacagagcaagactccgtctcaaaaacaaaacaaaacaaaacaaaacaaaaacccagtgtcaattacattgccactgcttacaagccccctctcccttctcatttcatgcagaggaccccaaaaatgatccccaaagccctctgtgacctgaagcacctcctgttgcctcccacccattctcctcccctctcctctccctcttcctaatttttctctgccaggccactctctaggcacgctcctgccccagggacattgcactggctgccctgtgctatgtgatcgtggaggacagatcacacagtgtgtccaaagtgcagtgagtctacagcacactatgtgtgtgtgcacagccaggagcccagagaacctcttctttcttatcttcagctgtgtgtcttgtgtgtctgacatatgggtcaaatctggatgtttatgaagtgtgcgtgcatatggacaccattgatttcaaatgttatttgtggcgggtgtgtcagctgtaggtcgctgctgagtgaggtttgatgcctgcatgtggttcgtctggaacaaagactcctggggcggtgctgacttagggcaggcaagggtgtgtgtgtgtgtgtgcagagcttgccggaacgtgagctgttcatgcacgcgtgcattcaacatttgcagagtgcttactgtgtattggagatgccagcagttcccttcagcacttggtatctgtcagcttgcacagggtcatctgagagcattttgtgtaacgattgagcacgtattgttgtatcaggccctctgttggagatgctggttgagtgcggtccaacctgcaggagtccactcaagcaggccccttccttcctcctatggggtctccagccccatagccacctccttcttccagcactgacgggaaagaaggctttgagctccttctggatcactgctttctgcccaagactgcacaagtcagagttttctgacttggaggttaaaagaataaatgagctccaagctacagaggggatcctgggagcctggagcttaccagagatggggggtgaggggtgcccccaaaaggtctagatgcttcatagacgcctatagatgcaggactttgagccctggctgagggtcagtgtgttgggagggctggtgcttggggatctgagggtgttgggtccggtggaatggactttgggagtgtaaggtttgaaggatctgtgggcagggatttgggggagtgggagatgagttttgagtagagaatgggagataattggatgtgcagggttttagagtatgagaaaccagaattggtgtatgaagcaggtggtgggaacctaaggccagatgattggggtctcagggtggaggctctgaagagggtatgtcaggggagggtggggaaccatgaggggctggaagtctgaggcctgggcatgggtgagtttcgcccctgagagaggcctgggaaggaggtaagactggagtcggggtgtgcagggtggggagagggagggtgtggttctcagagcttagagacccatttctccatgctccatctcaccctccctcccaccctacctataactcacttccctgtggctccaacgcctcaaagtataaccacgcccagccaacgcccggggcacgcctgccagcgccccagggcactcacagacactccttaacacctgcacgtgccccgcccctcctcagatccgccgctcacttagcccggccccacccccatcagatgaggctccgcccccccggccccgccaatccctcgccccctccacgcacacacccctgatcttccccgccctccttccaaccagactccacccctcgcccaggccccgcccttcctcagaccaggccctctcttcgcttgaccacatccatccccagattcctcctctctcctgcccagacccgcccaacctcagacccatcttctcctttctacctccccgaccactcccccaccgcattcctaacctccaccttgtcccttctcacacctggccccgccctttatcctgcgccccgcctcctccgcaggccggacccttgtccctcctcctcttgccctgggcctgccccttcttcagaccccgccccactcctcagcccagggaccaaccccatcctgcgcctacttgtcctgcttcgccccgtccccacctatccacagacaatacgccctctcagcccagaaccgcttccctttcagacttggttccgcccctcacgccagggtcccgccccaatccggcacccctagcccaggccccgccctggacccacctctctgcatagcaggcccctccctttatcccagacccgccccggccctccgtagaccacgcccctccgattccgggcccgccccaatccttggtttctggtcccggccccgcccctccgcagacctggccccgccccgccccccgcgtctcggtttcccgggcctgcgcgcgcggctcccgtcactcgaacgcgcgacggcggggggaagatggcggagtccggcggtagcagcggtggtgctggtggcggcggcgctttcggcgcgggcccgggccccgagcgcccgaacaggtgagacccggcccgcaggatagacctgcacctgtcttggagcccaggaaacctgtgggcagtcttgggcgtcctgaggggttgaggggaggcctggcacggctcgagggtctttcgctgagaatttggactttacggggccgtggggtactggaggagccgagggctactgagggggtggctggaggggggctgggtgccccaggacctcgaggcgtctgcaggcggccctagggacctgagaatcctgggggtctgaagggaaaccgaggggctcttgactgtggtgggccgtggggcaactggggatgccaaagggcctgggcagcagagagggcctgagcaggggccatgccatggccagtctgagggtggtgaggtgtcttgggggctctgaggaaggggctaaggcccaaggcatcctgggaggtgctgaagggccccaaggtggctaaaggtggtcctgagagcgtgctgaggggcgctggaaggagtagagactgtgggaggctctgggtgggggacttaggtgaatctgggagtctgagatggggaggctgagggggcctggggtgggtctagggaacctgaggggggtgagagaactccagggggtttataaagaacatacagagggttcttctttggggctcctcccttccatccccatggggtccaaatccacatccccaacaggctaaaggacttacagaaaggtcttgccctcagacaaggggacagaattcacccctttggtcagagggaggccccctttccccatggcccagtcctgacatggattgcttgaacgtccaggtttgcatgacaattagttatcatcaataactaatgatatgtgtgtgcatgcattgtattggattgtcagagggaaagaacacctgccttaggagtgtgatctcctgctcttttcctattgggcaaagccagaccctcccaccccagctcctcctctagcccagcacccaggtcaggccaaggaggaaattcaggctttttcttgctggtgagcttccaggagccagtaatttcaggcaacatgataaatgatgaagttgtttgatacttacgtgctgtggagttttggacctgtgggctgattgttggagggaatggcctgatggcctggctgtgtgatttggtactgaatggaacacgcatgggatgggtggggaagggaggagggatggctgggccagggcacagaggaggcaaaggccctgcctgttcctgaggatgctgagtggcaccttgagacttaggtctgtgggcattgaatctggtctgccagaggggccatggggaacccaggaggtgtgtgtccagaggggtgaccagcctcctggggtaggtgtggggcaagattgtcctgcagtagggagccaggagatgtcagaggattttcagagatattcagggagtggccagggcttgaaaattgggtatcagttggcaagtaagggacagggaagagggacagtgaaccccaggtccctgccttgggcactggagtgggataacctggggctagggctttttttatttttatttttttgaaaccccgtctcgctctgtcacccaggtatctaggctggagtgcagtgacgccaccaaggctcaccgcagcctcaaactcctggactcaagtgatcctcccacctcagcctcctgagtagctgggactacaggtgtgcaccaccacacttggctaatttttaaattttttgtaaagaccaggtcttgctctgttgccaggctggtctcaaactcttgggctcaagcaatcttcttgcctcacccctcactaagtgctgagattacagatgtgagccaccatgctgggcatggctctttttttataaacagctttatcaagatataattaattgcatggcatacaattcactcattttgtttttatttatttatttattttttgagacagaatcttgctctgtcacccaggctggagtgcagtggcgcaatctcggctcactgcaacctctgccttccaggttcaagggattttcctgcctcagcctcctgagtagctgggactacaggtgcccgccaccatgcctggctaatttttgtattttttaagtagagacagggtttcactgttggccaggcaggtctggcattcctgagctcaggtgatccacccgcctcggcctcccaaagtgctgggattacaggcgtgaactactgcacccagccaattcactcattttaatttatcattaagttttttttttttttttttttttttttgagatagagttactctgttgcccaggctggagtgcagtagtgtgatctcggctcactgcaacctttgcctcctgggttcaagcaattctcctgcctcagcctcccgagtagctgagaccacaggtgcatgctaccatgcccagctaatttttgtatttttagtagagacggggttttgccatgttggccagggtgatcttgaactgctgacctcaagtgatctgcccgcttcagcctcccaaagtgctgggattacaggtgtgaaccactgtgctcaacccaggtcattaagtttcagtacatttactgagttgtgcatccttcaccacaatccagttttttggaatgcttccatcaccccaaagagttcccccaagctcgtctgcaattaaccctgctccaccaacatacagccccggggacatcctgatctgctttcactctctgtagctttgccttttctagaaatttcgtaagaatggaatcagacatgtggcctttacgtctggtttctttccttaacataatgtttttgaagttcatctgtgttgttgtatcagaaatttgttctttttcactgtggagtgaaaataaacaaactgtgtccgtccatacaatctcgtatggacggacacagtttgtttatccattaactggttgatggactgttgggttgtttccattttgacaactgcaaataaagttgctgtgaacatctggatatgtgtctctgtgtggacgtatattttcatcctcttgggtaaatacttaagagtagaatgactagttcatatggtagatgtgtttaaatttctttttttttgagacagggtctcactctgttgcccaggctgaagtgcagtggtgcaatcacggcttactgtagcctctacctccttgggctcaggtgatcctcccacctcagccttccaagtagctggtaggtactacaagggcgtatgccaccacacccagctattttttctgtgcttttgttgagacaaagtcttgccatgttgcccaggctggtcttgaattccagggctcaagcaatcttcccacctctgcctcccaaagtgctgggattacaggtgtgagccactacgcctggctatgttttaatttttttttttttttttttttttttgagatggagtctctctctgttgcccagcagttgttcactgcaacctctgtctcctgggttcaagtgattctcctgcttcagcctcctgagtagctgggattgtaaggatgcgccaccacactcagctaatttttgtatttttagtagagacggggttttgccatgttggccagactggtcttgaactcctgacctcaggggatccgcctgcttcggcctcccaaagtgctgggattacaggtgtgagccactgagactggccatgttttaatttttaggaaactgccaagcttgttcccaaagtggctgtaccattttgcatccccaccagcaatgttcaagagttccagctcctcctcatcctcactaacacctggtatggccagtccttagttttagccattcttataggtgtgtgctggtgtcttcatttggtgtttttatttatttatttatttgtgagatgaggtctcactctgtcgcccaggctggagtgcgatggtgcgatcctagctcactgcaccctggaactcctgggttcaagcaatcttcgggcctcagcctctggaataagtgggattacaggtgtgcacaccactgttcccagtcttattttggttttaatttgcatttctctaataactaatgatgttggacagtttttcatgagcttcttagctattcatctctttggtaacgtgtcttttcaaatgtttgggccatttttaagttgggttgccttttttttttttttttttttaagactgagtctcgctttgttgcccaggctggagtgcagtggtgcgatcctagctcattgtaacctccacctcttgggttcaagcgattttcatgtctcagcctcccgagtagctgggattacaggtgcatgctaccacacccggctaatttttgtatttttagtggagacggggtttcaccatgttggctagactggtctcaaactcctgacctcaggtgatctgcctgcctcaggctcccaaagtgctgggattagaggcatgagccaccacacccggctctttttcttttttcttttttttttttttgagatggaggcttgctctgttgcccaggctagagtgcagtggcgtgatcttggctcactgcaacctctgcctcccaggttcaagcaattctcctgccccagcctcccgagtagctgggattacaggcgtgtgccaccacacccggctaatttttgtatttttagtagagacggggtttctccatgttggtcaggctggtctcgatctcttgaccttgtgatctgcccgcctcagcctcccaaagtgctgggattacggcgtgagccaccatgcccggccctctttcttaaaagacatctttgtcattctcccctatcctccatcctagtgaaaaatcactgtttggagcaactgataggggcatctcatgcctcaggtgctagtgtggggagaacccctaatgtggcaagatggagcatgcagaaaatggatcatattttgagggagattggtacaagacattctcccaaaagtcattttgagacattgagtctttgtagcattgttcgtctgttccttcatttattgcaaatgggacagccaggcctggagcacgacccacctcctcgcctcaacctgcccacgtctccttcctcttcatccttccactctccaaggttctggcccctcagagccacctgcctgaccatgcaagctcaagtagtccccaggacacttttgctagtcacctagtgtgtgtgtgtgtgtgtgtgtgtgtgtgtgtgtgtgtgtgtgtttgagatggagtttcgcttttgttgcccaggctggagtgcagtggcatggtcactgcaacctccacctcccgggctcaagcaactgattctcttacctcagcctcccgagtagctgggattacgggcgcctgccaccaagcctggctaattttgtatttttagtagaggtggggtttctccatgttggccaggctggtctggaactcctgacctcaggtgatctgcctgcctgggcctcccaaagtgctgggattacaggcgtgagccactgcgcccggcttgtggttttttgtttgtttgtttggtttggtttgaggaagagtctcactctgtcgcccatgctggcatgcagtgtcgtagctacctgcagccttcttgacctcctgggctcaagctatccttctgcttcagcctcccgagtagctgggactacaggcatctactaacacacctaatttttttttttttgagacattgtctcattctgtcgcccaggctagagtgcagtggcacaatctggactcactgcaacctccacctcctgggtttaagcgattctcctgcctcagcctcctgagtagctgggattaccagtgcacgccaccacgcccaaataatttttgtatttttaatagagacggggtttcaccatgttggccagggtggtcttgatctcctgacctcgtgatccacctgccttggcctcccaaagtgttgggattacaggcgtgagccactgtgcctagcccacacctgactaatttttaaaaattgttttgggccgggcgcggtggctcatgcctgtaatcctaggactttgggaggccgaggtgggcagatcacttgaggtcaggagtttgagaccagcctagccaacatggtgaaaccgcttctctactaaaaatacaaaaattagccaggattggtggcacgtgcctgtaatcccagctactcgggaggctgaggcaagagaatcacttgaacccgggaggcagaggttgcagtgagctgagatcgctccactgcgctcccacctgggcgagagaaccagactgtcttaaaaaatatatatattattttatagagatggggtcttattattatttttttttgagatagagttttgctcttgttgtccaggctatagtgcaatggcatgatctcggttcaccaaaacatccgcctcctgggttcaagcgattctcctgcctcagcctcccgagtagctgagattacagacatgtgccaccatgcctggctaattttgtatttttagtagagatgcggtttctccatcttggtcaggctggtctcgaactcctgacctcaggttatccgcccaccttggcctcctaaagtgctgcgattacaggcatgagccactgtgtccggccaagatggggtctgattatgttgcccaggctggtcttgaactcctgggctcaagtgatcttcctgccatagcctcccgaagtgctgggattacaagcatgaaccactatgcccaacctgtatttttgttttttgtttttgaggtactatatatgtaacacaaaattcacccactttaagtgaacaattcagtggcatttagtacattcacagaattgtgcaaccatcactgctgtccagttccaaaacatctttgtccccgcaaaaggtgaccccatcttcattagcactaaccccctattctccattgcccagcccctgacaatcaccaatctgcagtctgtctctatccgttttcaagttttataggtagaatcatgcactatgtggccttttgagtctggcttctttcactcagcatgatgctttgggggtcatgcatgttgtagcctaaatcagcacttcattcctttttatggctgagtaatattccactgtgtggatgcaccacatcatccattcatctgttgatggacacttagattggttccaccttttggctattatgaatcatgctgctatgaacatgagtgtacacatttttgtctaaacactcatgttcagtcctttggggtacacatctaggagcagaattgctggggcgcatgcttgttgtatattcttgatcatgctggtcaccacctaacgttatttgttgtgtttctctggtgccttgaggttggaaagcctgtctctcttgtgccctcttgtgtgcctggaacatgaatgacacagaaggaggaagtgtcccagagacgtggctgagagggaggaagggagggatgggggtgtgcaaaagcttattgctctctgaggcttgcagtctggcaggtaggaattcccttctatgggatcaggtcgatcttttgcctttccagtgaggcttgtggggctgctggggggcagtgggggctggccttagtctctagctgcctttctagcctgccaggcaacgcccgcatctgcctttttgtcccacgaaggttttgtcttttggccaggggcgggggcagttcctgtcttccccctggcccttccagcggtaccacaactcaagaaactgtccccaggagggactgcgctcccccacccccgaccgcccccaacgttatataacttgtttgttccaacttctgtcttctgcaaccgagggggaaaaaagaaagagaaaagcttattctccttccttcctatctcgagggatcaacaaaaaacccgttgcctagtagaggtggtcattaatgactgagccgaacctcagggatggacagagtggggctgccctggctggggtgtgcggagaggaggtggggtccttgctgcaagcacaaaggacacttgttcaccagctggcctcctcccagctcgggccgcggggtctagactccttggagggaaaggaggcttgggccacttggggtgtcgcaaggggaggcaaaccctctggggagtcgcacctccccagctaaaattctgtcactgtgaggtacctgaccggcagagttttggaggaaccttctggccttgcagcctctccgacatgggcctttggcatccacgctttttggcccacgctccctggagacgcctgggtagggcccaggctcactgagtcatgctgttcctgggggtgaggtggggggatctgggtgagggatgtgccagcttcaggcatttgcataagaagtggtggctaggctgggtgctttggctcactcctgtaatcccagcactttgggagcccaaggcaggcagattacaaggtccagagtttgagaccagcctggccaacatagtgaaaccccctctctactaaaaatacaaaaattagtcaggtgtggtggtgggcgtctttaatcccagcaactctggaggttgaggcaggagaatcgcttgaacctgggaggaggaggttgcaatgagccgagatcctgccactgcactccagcctgagcgacagagtgagactctgtatcaaaaaaaaaaaaaaaagaagtgatggctgggacgttgtgcccaggggctttgctgcctgctgaaagtgtttgcatggaaagttgtggccgagacgctgcgcccggtgggtttgtcacagtcagtctggctgggtggcctttgcctgttgaagctttctccacaatctagatcatctccaccaagcccagaggccttggaagggtccagccccccagctcctgctaggaagacttaggggaagaggtggcttcccaaggaggttcttgctactttggggaagttctcattcctttggcctcttgcccctttcttttttattattattaattttttttgacgtcactctgagctcaggctggagtgcagtggcatgattttggctcactgcaacctccgccttctgggttcaagtgattctcctgcctcagcctcccaagtagctgggactacaggcgcccactaccatgcctggctagtttttgtatttttaggagagatggggtttcatcatgttggccaggctggtctcgaactcctgacctcaggtgatccacctgccttggcctcccaaagtgctgggattacaggcatgagccagtgcgcccggcctcatgcccctttcagaaggaggattttgacccttccaagacgtggactcaagtccttctcctggaaaatgtggtcagatatggcggcatgaggtgtctcatcatacccatgggtgactgtggctccctctttatgggttgtggctgtgacagattcctcatctgggaaatggggctccaggcccaccaggtggggggtgtctgggaggaaacgagtggggagaggtcacatgtacctcatcagtgttactgtggcagtgctgacgcccatgatggggacactgccatccttctgcccgccatgcccgcatgggccttgaggggatcgtcaatgccagcaagccttgatgtggcgtgcgtgtgtcaggcagggaaaggagagggtgaacttgagccattgggaagacagtagtgccatgacttgggccgtaagagggacagcagcaggggcagcgagagagtagagcacgtccagcgtgagctggagagggcaggttccgccaggagtaggcctgggagcaggagctcggcagggcgggggcaggggcggcggggggtggcgcgtctcagcagggatgggggcaggtggaactgggccagcccaagaagggcactggcccacaggccgagccacatccaggccactcgatctgcccctcacagctgagccccttctctgggaaggaggccaccctctcctcccctccttgtcggcaggtcccaagagctctgggagtggaattgctctgaaagcactcacttcaacctgaatcgtgcagtgcgatcgtcacagctggactgtttccacctggtagctgtgacccccgggacggcctccttgtcgttgtccgtagttaccggggaagaaaggctttattaccctccgccataatcgcaccatctccagggagcccctgcgaatgtcatcccacctcccccacggcgattactttttatctcacccacctctcctcagacactgtaaaagggaggctttctcctcactccagccctttggttttttcctttttctgatatttgtgtgtgtgtgtgtgtcttaccctttggttttagggaatgttttagatttggtgttaagaggccctggaggaggaagagaggaggaggaggaagagtggaggaagaggaggaggagatgagagggaggaggaggaagaggaggaggagaaaaagaggaggaagaggaggaggaagagaggaggaggaggaaagagagaggaggagaaaaagaacaggagaatggggagggagagaggaggatgagggggaaggacacagatagaaataattcagcgacttggggccttggatcctggaagaagggggtgggatctactgaaggcaaggggtgactgggcagcatgtgtcccggcatccccagctctttgctctgtggacaggatttgttagacacatttctctgcctttgtgcaggtgccacagtctcctgtgtccaccccatgcctggtgctggacatgaagggtccatgggacagatggaccctgcccatggggcgcatacatgccagcaggagttagagaacgtcgtgcggtcatttccgggctggctgggccagggggccagggcagggtttgggtgagcggcatatcagtcagcctcctgttttgaaaggatccctctgtaggccgggtgtggtggctcacacctgtattcccagcacattgggaggccaaggcgggtagatcacttgaggtcaggagttcgagaccagcctgggcaacatagtgagatccagtctctactaaaaatacacaaaactagctgggcgcagtggcgggtgcttgtagtcccagctgctctggaggctgaggcacgagagtcgattgaacccaggagccgagattgcaccactgcactccagcctgggcgacaaagtgagactctgtctcaaaaaagaaaggatccctctggcaagagacaagggaccctcggccaaggtgggccctggagggatggagaggcacacgcaggcttggggatgcctggaggttgagcttgtgctgactgatagtggtggccagtttctgccctccccaccgggcaggctgaaggtcagggttgtccttggtcccgcgcggctgcactgcctgcaacaagcagcagacttggaggcgccacctggcctaggggattcgcagcccttcctgtgttccagaaaagcccttcatgcctctccttgctcagggttcgtgccacttggagctcccacagtccttgagggcttcaggtcttcccaccagcaggtcccagtcctgggaatgtccctcctcctgagagaaggcctcagtctggctgcagctgcccaggaggtcctcaggtagcatctcttgtgggttccaccttcgagccacagcctggagccagctcctcctgctctctcctccccatcccagctcagagccactcctggctcttccccttctgggcatcatccccaactccagccagcgggaccctcctaaggcaggaatcagaccacctcactcccctgccggccacctgccagtggctccctcactctcagaacaaaatctacttcttgatgtgacccgctgggcccctgagcttccgcagctctgacggctctgctgggctctgaagcacgctcactggaatgtcctgtcccagtgatttgcacggctcaagtgttgtctcctcggggcctggccactgtgtccaccgtggcgccactgctcgccctgtcgtcatggtacattctctgcttgaggacccatgtccctgtagaatgtacgttccccaagggcagggctttatcagatctttttacagtggtggtcctggcgctggcacagctactggcacgggatggatgcttttgagtgtagatccagtgagtaccccaccccgaacagtcttcgatgcataccagaggggaagcctcctggcatagctctgcatgcccaggctggccgagggtcatccgcctcttcctcttcacttcattgaaccagcagggtgtgggcggagaagcagaaattcacaggcatgttgtcagtaaaccagccctgttacctgttacagagcccagggcaccataccgttttgcgtgtgctgtctttagtgagtgagcaaaacctcagccctgcatgttaaagcaaaggcggcaaacgacagccgctctctccctgtccagctgtctgaagtggaagtgggggccaagcccgctgggttcccgctgccggcagccccgccctcctcctctggtagccgctctgcagctgtgcggaccagctctcttaacacttgttaaccccagcctccagtcccttcctgccccccaccccgccccttccacatgtctctccggagagggccgcacagaattcacaggactcgtctccaacggctgcgccagcaattccctagcattcctcctctgcagagtggattttggtgcatgtccagcgtgatttcagacccctcactgcgcagcggagtgcctgatcgctctgtgtgcaccaccacggtgcacactgaaaatattgtgatctgggaggaagtaaccagcaccttgggggaatcacagacctttcctgcgagggcaagggcttccggaattgaacaggctgggcctggaggagatcttgaggggtggaccttcaggcttgtaaaggcctggaggggggtcacccgaggatcgaggccgaagatgtttactgacgccacaactgtgaaattccacaggggtcaaagacggacccgggcgggagcggtctgggctggatatccggagagttctgctctccacgggatgttagaatttgaggcagtctgcctaaggaggcagagcagagaggcatgtgatcacccagatcgtctgagagcgggacattttcccggagcggggtggaaggagtgtcaaggtgactgtgagatgacagacacgtaggggagccccacagaggacccccaagacaccctctctgttgccatcagcctgagtcatcctctatctgaaaaacttccaggactgaagttcgagttggaagcacgcgttctccttggtgaagtccgtcctgtcccaggagggctgcgctaggtctctcctctggctccccctcctcgggtcctcgtggctctctgtcgtgtgaagcggggggtcaggagcgcacaaatgtttatactccacgtgagtcacttgcacagatgacgggtgatgttttcctcgccaaggctgatggcaccgggcccctttgccgttccagcctcagtcacgcctccagtctgttagcatttagagttgctgaactttcgcattggtcaggggcgcgggcagcttgctgaccttttctgggagtcgtggcggacggagtggagccgtctgtctcgtcacagacaggcggggctgcggctggggatggccgccgcccactcgccctcagaatggccctcagcggggcttcctgacccctcagccccggtaggaagctggtgtgcactgcagggagaggcggcagctggaaaagtgttaaggccacagtggtttttccagaggctcgtctggaatgccgtggctggatctgagcctcctgacatccgaggcccctcttggtggggagagccagaaacccaagatactgccgtcagttaaagactcgaagttcacattttaaaaagtgcaaggagacacccggttttaggtacgttggggtgcaaggtctgaaggctggaatctgtggctcccttctttcagctctgtcatccctcttgtctgggtgctgcccacctggtagaaaggggacctcaccttgccactccactagcctgccaacaccaccaggaaggcgacccttcatcctggtggctccagtaaaaatcccagggaaggctctgattggatcagaagggccaagtccccatcccaggatgaatccctatggccaggggccctggagcctctgtccagtctgtgtcacatccatattttcagcccagcaatgggatctgcctgatctccaccactggggctgagcatagagaagaggaggttccagaggagaacagggggcccttatgagaagaggggagggatggtaaacaccccaaaaatgaagatattcatgacagaccccctctgatgctgaaatttgtgttgtctttggaaggtgctgggctaagctgtggagtgcctgcatctggcctggctctgctggggatgagcagtgccatgtggcagccccgtcccttctggggcttcaacacctgtcctgccagtggaggcagtggggtgggctgccttgcagcacgttaccaccccgacatgctagaattcagcagtgctagaatttcactgggtttccaagcggtgctctggagctgtgcagtcatgtacctacttgcctgaactgtggagtgaagggatttgctcattcaagtggtccctgctgccggcccaatgcagtgggaccaagtcgggggatgggctgtggcagaagcagtctcacctcagtgggagggaatgggaaagggaagcctcaggccgagacctgcccactcgtcagccctggatggggacccagctgggccatgagggtgaggaaagccatggcagagaaggctctggggtggaggcagcagaggtgctgagtgcagaaatgctggtgggctcaggagtgtggtggagggagaagggtctgagggcaagagggttggccactcagcacagagcacaacatgagcaaaggtccagagacaggatgtgcaggagagtcccactgagggcttcgcggtggatcctgaaggatcacatacactaggactcgggccaggaggtcttgtggggaggaacaagcagtgagctaagataagagttgggctccagcaggccaggtgcggtggctcccgcctgtaatcccagcactttgggaggccgaggcgggcagatcacctgaggccgagagttcgagaccagcctggtcaatgtgatgaaacctcgtctctattaaaaatacaaaaattagctaggtgtggtagtgggcgcctatagtcccagctactcaggaggctgaggcaggagaattacttgaacctgggaggtggaggttgcagagagctgagatcacaccactgcactccagcctgagtgacagagccagactccatctcaaaaaaaaaaaaaaaaaaagagttgggctccagcccagtgctgccacctgggagccatccacctgccacctcactcattcactcaccctcaaaccccacctccctggccagcagcaagctctctgcctccacagcacccctcccatcctggcttgtacctggaccacagtgttggggcgtccccatcagaacagcctccacgaaccaagggagcacccactttgtataaggccatcaactggggtggtgcagttctggttcctggctccgttgtcggcaggcagcctagaaaaggggcacggctatcatcccattttacagatggggaagttgaggcacagagaggttcaggggctcatccaaggccacacagtaaacaagaggcagagggacactaggtatggccagcagagaccttctttggccagtgcacaggtgctttttggccttttcatggtcccaagtgggtgggtcctatgatcatcaccatgatgcagatggggagactgaggctcagagggctgagactgctcaccaaggctctgcctgagcctggaggatgcatgtggagctaaacagcaggaagagcaagacaggggctcttcagggccggcccagcacaaagatgtggatttatctgtccatctatccacccacccttcatccaccattcatctatctgccacccactcactccttcttacccacctgttcacacctatgtccaccagttcacccacccacctgaccatccatacctccacctgtccatccaccccaccacccacccacccatccgcccacccacccacctgcccctatccacccatcttttcatcagtccacccttccatccacccacccatccacctgcccttccatccacccacctacccatgccacccacccttccatctacccacccacccatccatccacccatccacccacccttccatcagtctacccttccatgcacccacccatccaccctaccatctacccacctaggcacccacccacccttcacccacccacccatccatccacccgtccacccacccttccatcagtccacacttccatccacccacccacccacccttccatctacccacctgcccacccacccacccacccttccatctacccacccacccacccatccatccgcccttccatcagtccacccttccatccacccacccacccttccatctacccacctacccacccacccacacacccaccctttcatctacccacccacctatccatgcacccatccacccacccttccatcagtccacccttccatccactcaccatccacctgcccttccatccacccacctgtccacccacccacccatccatccacccatccacccacgcttccatcagtccactcttccatccacccacccttccatccatccatccacccacctacccacctacccatccatccacccatccagccatccacccaccctttcatcaggccacccttccatccacccacccatccacctgcccactcttccatctatccacccacccattcatccacccacccacccacctacccacccacccatccatctgcccttctgtctgtcacccatccatctgcccttccatccactcatccattaactcatctactgcccatccaggcacccttccatctacccatccacctgcctaccactatccatctaccaacccacccacccatccaccaatccactcatccaccatctgcccactcatccaccatctgcccacccatccacctgcccgtccagccacccttccatctactcacctatcactatccatccaccaacccaccatccaccaatcctctcatctaccatccgcccacccatccatccacccatccaccaacctacacacctgtctgtccacccatccacccaccctttcatccatttattcacccatccatccatctacccacccagctatccacccatccattcatccgtccatccgttcatccacccatccattaactcacctatacatccacgcaccctttcatccacccatccacctatccatctacccacccatctatccacccatccatccactcatccattcacccctccctccacccacttacccatccattcacccgcccatttacccatccactcaccgattcacccatctacccacccattcatctgtctatctaccgtttgcccatccacccactcatttacccatccatctacctgtccattcatttgactgctcatccacccatccagttgacaagcatgactgagctccaaccatatgttaggcatggcggtgagcaccagaacattacaggagacagaaccttgcctgctcggcttccatggggttcccctttcagccatggggagacaggctggaaacagatgatgtggcagatggagtgaggagcagggaagacaaaaatggcccaggtggggatcagggaggtggggtggctgatgagccgtagaccgaggctctcccagcgggacctggcaggcaccgccccttcatctgtagagtggggttccctctcttgcagggcggctggaggactagtggggtaaatccacattcttgcctggggccggccttgaaaagcccctgtcttgctcttcctgctgttcagctccatgtccatcctcccagctcaggcagagccttggcgagctgtctcagccctctgagcctcagtctccccatctgtgtgatggtcacgatcagaggcccacccacctgggaccggggagaggtcgaccagcacccgtgtgttggctgaggaaggcctcctttggccaagcctggtgtccccctgcctctgtttactgtataactttgggccagtggccgaacttctctgtgccttcatttccccatctgtaagatgggatggtagcagtgccccatcagagactgcctgccacaaggtgggccaggagccaagactgcacagactgggtgctccctcggtccgtgaagactgttctgatggagacgccccagcattgtcatctggacatggagagccaggatgggaggggtgctgtggaggcagagagcttgctgctggtcagggaggtggggtctgaacacccccttgtcttctgggcctttgtttggatggtggggcttcctcttgttggccttgagaagtggctggagtttggcaagtccgggatgggggcgctgtgcataatgtcttcctgtccattggccgcagtcagagccccacacatcctggactcctggtggcattggtcagaggctgggattagggcaggacatcacagcccggccttgagggcactgggcttatggtgacccctgaggagcaggtgaggggtggccacacgtatccatcatccacccacccatgcctccagcctccttcctcatctagaacacccccatgctcctgagatgacagcttgcaaaccactgcacctctaaccccctgttttctggaaggtttgagcaaggctcaggaaaggggaggccacgcagcttgccctggcttcatggtggggttggtgggggacctgcaggatgggggtggacgggcctcagctttctgctcccagctctgtgggcttcacctctcaacctgctgagcctgagagcagggagtgtctcctgccacctcactgggtccttggggtcattggtcgtggtcctttccaattgatcctcgattccgaaacctgcctgcctgccctccctgaactcccggtgtgacttgggcagcccgccaccctctctgagccttggcgtccctggccgtcacttggctgtctgggggtgccagccctgggtacagtggcctcctgctaggcactcccagatgctctgtctcctgtcattctgtccccacccagcaggcacagacaggctgaagccaaggacagacaggcagggaatggctccagatcaggaggctgggaggaaggggaaggccagggcctccttcgcaggggtcagagggcatccatgcaggacgctgtgtgagttgggccaacaggcgcaactcacggcgagccctgtctgcctcagtagcgcggggctcttggaggaggcttgagggtgggtgggtggggaggccgcgaggttagggtggctctgaccctgcctggcctgcccagcacgcctgccctcccagcacagggcgggagtggcgggttcctgtttgaaatgattcgtgaagatgttggagaaaatcagcatgtcaagcaggagggagacacagacagctgcaccctggcggcccctgagctgcagtctctgtctccctgtctctgagtctctgtccctctctccctgggtctctgtctccctgtctctgggtctctgtccttctgtctttgcatctctgtctctgagtctctgtccctctgtttctgcatctctgtccctctgtctctgggtctctgtccctctgtctctggatctctgtctccctatctctgagtctctgtccctttgtctctgggtctctgtctccttgtctctgggtctctgtccctctgtctctggatctctgtctccctgtccctggatctctgtctccctgtccctgggtctctgtctccctgtctctgggtctgtgtctccctgtctctgtcatgagacagggtcatgagagaaggtatcagtgtggttggagtctctgtctccctgtctctgggtctgtgtctccctatctctgagtctctgtgtcttcatctctgggtctctgtctccgtctctgggtctctgtctccctctccctgggtctgtgtctccctgtctctgagtctctgggtctctgagtctctgtgcctccatatctgggtctctgtctccctgtctctgtgtctctgtctctgggtctctgtctctttgtctctgttgccatctctgtgtctctgtccctctgtttctgggtctctgtctccccatctctgtccctctgtcccagtctctgggtctgtcagtggctgagtgtcctggcctgctgggacactgcggtggggccctgcacccgctcctggctctcccacttgtccatccagaagccattatctttcctccactcccacgggagccaagggaggcagagaacagcaggtgccttggaaggggcggccccttatcaggagggataaccccaggaagtagccttgggcagtctgggggagaagcagggcggccgggcctcaggggcctctgagctgtcccacgggaaagcttgctgacgtgagcgtgggggccggagcgtttgagggccagcatgaggtgccggaacccagcaactccatcctgtgggctgggagcagttcccagtgctgtgaaacattgtggtcaccatggcaacagtactgggggagctgcctttgtggaatgggtgggaccctgcctctttgcaccttttaccctcgaggcacgtgcccaagagccagtgaggactgcagctgctggtggccaggggtgggggtggcgggggagcaggggcacgctgggccgcggtgttcccatcttggagagggatactgagcctgtgatctccccggctgctggggatttgtgaggctgcatgtgaagacctgtgcctgcttggcaaggtcagagtgggtgggaagggtcatgagagaaggtgtcagtgtggttggagagtagggtggtggctgtgaggctgagaggttggtggtgggattccaggccccccacagctctggcactcgagccccacaccacctcccacactgcctggtcgctgtcacccccacccctgccaccatttctgcttcccttcctttcactggctctctgttcctctctccctgtatttctctccttgtctctctgggtctctgtctccctgtctctgggtctctgtctctccctctccctctctccctgggtctctgtctccctctctccctgggtctctgtctccctctccgtctctctaggtctctgtctccctctctccctgggtctccgtctccctgtctctaggtctctgtcttcctctctccctgggtgtctctttctctccctcttgctgggtctctctttccctctccctctggatctttctctccatctccctctctctgggtctctgtctccctgtctccctgtctctaggtatctgtcttcctctctctctgggtttttttctcctcttgctgggcctccgtctctccctctccctttctctgggtctctgtctccctctctccctgggtctctgtctccctctctctgggtctctgtcccctctctctgggtctctgtctgtccccctgtccccctctctctgggtgcctgtctccttctctctgggtctctgtctccttctctctgggtctctgtctacctttctctgcgtccctgttcccctctgggtctctgtaccctctaagtctctgtccctttatctctgaatctgtttttctctctctgggtatctgtccacttctctctgggtcctgtttttctttctgtgggtcccggttcttctctgggtctctgtcccctccaagtctctgtcactccctctccgagtctctgtttccctctcttgctggatctcagacaaggctctcaggatggtcttggtccagttgccagcctgggactggctgggagagaggctagggattgggcagtggcttctcagccggccctgacatcccctgctgtcccctgaagtacagcctcttccccacccatgcactgagaccctggggcggcatcgcatcagccggggtgggagccaaccagctgtgctgtgctgctgtgctccttcgagccacatggacaataaaaccaaaattggctttgaaagtggaagtgctctcctctttgaggggaagtgagggactgcgcgcgtcagaaccgcctatgaggggcaatgccggcaggctccgttctggcccgagcgctgggctccgcgtgggggtgggaaaggattttacaaaaccccaaagaaatgtttccatgaaattctttcttgttcttgccttttttttttcttttttggacattccaatgaaaagaaccgttctggggctttggatcgcttctcatgggttgggaagccgaccatggagatgaggccagcccggggccggaggaggggcgcctgccctgacaggtgcgtgcccctcactcttgtccccctaggcagcccccacctccctctgctcctgatcctcccacgaggcttcatccctagggtgcctggccgcaacctctgcaactctgagcttcttgtgacctcccccacgaggccatcgtgccttgggctgggttcccccagagcagactctcaggcgggggttcgagggccccacgaaagaacagcgtggggagggaaggagcctccacagggtgtgtcagtagtgagcaggtggtcccagggcaacccttggagatctcgggaatcccataacaggtggtccacctgggggagtttaccccacccaggctccctggatgttagccctagcacatccctgcactgggacatctgagaggagcaggggtggtgttgccagggcagacctgggcgtgtccttgggtccagcacaggcctgggcctggctagggtgcccgatgacattgctggggggatacagcggcaagcgggtgtcagaatggcccctagcccgggccaggcctgtagcgggggcgtgtggccactcagaggccagattcgggcagagggtgcagccagggcgggcagcaatggcctcttgagacggccctggccggggctgctgacgcattggctccgatgactcacgtgcgggtgaccgtcactcgagtggccgtctggagactcggaccggctcagggccaccgccttcctgggggcctgtggccccgccgtgccggccgccccctgtctggaccagcctgagtaatgggtccttcccctcctcccagtggccggctggagaggaccttagtcatcagccctggccccggccctccctcctccgcctgcccacctccgcccaggctgcgtctcgcttctccgtccaggctgggggactcctgcccctcctggcctcctccctccttgagttccccaggaggggctgcagtggggtgggtttggcttcacaggggcggcagtgagggtgacgtcaggggcctcagggacagttgtcccatccctaagatgagaggaaggaaacagccatgtggaacgcgtcaggcatcaccagggcatgaggaggaggcctggggaggacaagctgcttcctcccctctttggtccagcgtgggccctgtgccctgtaaccagcagtggatgggcctcaccctgctttctgggcctggggtgtcctaaattccagatgggagcatccagattctccgagtgtgtagtcgtcacgtgctagtggcagcctgggtcccagggctctgcgtttgctcatctcatcctccagcggccctggggctggggagctggatggtcatttgcccctgctttgtagctgaggcctgggtggttgagtgactgctgagttcccagctaaccagagctggcttggcccaggctgctggcccctgatgtctcctctgagatgccctgccagtcagctgaactgatcctgccttctgggttccgggcaccctctctgcttgctggggaacccacagatcccatgtttggaacactggcccacctccctggtttcctgttcctcagtcatcagagtagcagggtgcagggcagtagctcctctcctccccagagggaggtcctctctgtccaacttctcagttctccagatatgttctgtgcactcatgggcagatgcatatgtgtggcactttgagcccaaatagcatcccactgtgtgcactctgcctcttccttcctcctgcagccttgacgtcatcccctgcatgcaacatcttccccaggatgcgtcagcctcctcacccatctatagggcagccctcactcagaaggtgctgtgattccacgaatctcctttaagggtggttagcttatttctcgtctgtggcccctagagattgtatttgggtaagtttcagaaatagagttcttgggtaaaggacatgagcctttagagtgttgctgagtctacgcagctgccttcctgggggtcaccttgcttcataagccccccgagagtgtgcttccctgactgcaagcgaggctgactcttacgtccttctagccagctctgcttgctttcctgggaaccattagcccacattctttgtgcatctttcgatctcactctgtcacccaggctggagtgcagtggcacaaatatggctcactgcagcctccacctcccgaactcaagtgatcctctcacctcagcctcccaagtagctgggaacacaggctcatgccagcatgcctggctaatttgtattgatttcttgatgctctttatatatggaagagcatggtaaatatgctcctaaggactgagtggccccgtggtgaacttgtcccagtgcaacgtgtttcttctgatgaaaatgtacacatgcacacctgcctccaagggctttacaggaggcacgagaagtcctcccatccctccccgcaaatctccttgaacttctaaggaaaaaccagaccaaaatcaaaatggcaaaggctggcaaggcccatgcatacttctgggagacaaagtgtccacagaaaggccggcaggggtcacccagagcccgaatgcacaacccttgccacagctgcaacacaaagctgattctgggtgatctgaccccttttggtccccattgcctggaccgcgtgcccatgaggacggggcctacttcgtctcatttacgcagcatccctgcatgcacgggcagggaagaggagtttgcaaagccagtgaggcaaactggggacaaggagagaccttgagggtcctcagaggcacatgcaggatgcggctttggccccaggcagcctggacacccgtcgcagggtgtcggtgagagggcatgccattcgtgggaagcaatgagaccctgccctggagatgtccaggcaggtgctggacccctgtggggggctggataggggagagcggcccatgagcctgcgacatgctcctcacaagcctcggatctggatctgtcatgggtctagggaaaaaagagccaaggcttggctcagggcagcagcctggtcaagtgggatcggggccgatgtgtggggaggggaggaagggaggaggggaggtaagcgtcccttccacttggcaggggaaaggccacggggacaagccagagtctcagggtgcacctggacccctttccttccctgccctcctcagctttcaaaaggctgcacccccaccctcccaggcaaacaccaggtctgggctccagcacccccagcaccgcagcattgctggccagcccagatgaccgtggcattgggctctgagtagcatatgtcctgcttccccagggactcaaaggctttccactgagcacaggccccacactgggtccttcgtgctatgtccccaccctctaggacatgcagtgcctcgcaggcagggctggggcttgggcaacttctctgcctgtggtgccttgcagggctgtggtcagcgcctggccctgaagcccctctccccggcagtttgtcttgatcactcaccctttcccaagggtctctggaagggtggtctgaaggggaggtcagggacctccggtggcagctgctatgttgactgagtgcccactgtgtgccctgtgtttgacgttggctctttaatgcccactgtggttttggggctggctggcagtggggccaaggagccttccgtctcctcccgctttcttggaaagatcagtgcccgcattcctggcctttgcttacaggcaggcgtgggtcccaggaatgggagagcaaattccagagggcagaggccaccaggacagagcagggtgcctcagcccggtgggggtgggggtcttagaggggactgatcctggaggtggcaccagggtccaccccctgttgtgttctgaggaagaagtggtgtgttaacggctcctaagctattaattcattgatccgttcaacagtttccccaaatgaaatagcaaaggggtggtggggctggagaagaggggatgagggggcagtaggggcagtgggggctggaccacagagggctcgtatactctggggtgcagggggctgtggcggggcttgcaggggacttgagaaggctcccgtgtgtcctttggtttttttattgaagtgaaattcacgtgacataaaactgtctgaaagtggacaattcagtggcatttagtagattcacagtggtatgcaaacaccacctctgtctagttccagaacattctcatccctccaaaaggagaccccaccccatcagcagtcactcccccctcccctcccccagcccttggtggcacccatctgcttcctgtctctgcggatttgcctgttctgggcatttcacgtcagtggagtcatacacagtgcggccttttgtgtctggcttcttgcactgagtgttgtgttcaaggtaatagtgtgtgtgtgaacctctgggccatgtccccacctctgctttccccgcagcacggccgacaagaacggggccctcaagtgcaccttctcggcacccagccacagcaccagcctcctgcagggcctggccaccctccgcgctcagggccagctcctcgatgttgtgctgactattaacagagaggcctttcctgcacacaaggtcgtcctggctgcctgcagcgactacttcaggtaagtgctggccccaggcagctggaaggggcggctgcctgttgggacagggacagggcagatggcacccactttctaaagggggcctgtctcagcgctacccagggacagcttcgagggagaacggctggtaccggctgctctttttttttttttgagatggagtctcgcgctgttgcccaggctggagtgcagtggcacaatctcggctcactgcaacctccgcctcctgggttcaagcagttctcctgcctcagcctcccgagtagctgggagtacaggcacccgccaccatgcccagctaattttttttgtattttttagtagagacggggtttcaccatgttggccaggctggtattgaactcctgacttcgtgatctgcctgccttggcctcccaaagtgctgagattataggcgtgagccaccgctccgggccccttctgattttagagagaggtttaatgtccagtaaacctgcaggtttcccggagtttgcatcttactctctttgggcagaacatgcctggagggacagagatggcctgtgggcacccactcacttctaccctgcatgcagggtggcagggcttggccaggtttttgatctgttttgttttttttttttttgagacaaagtctcgctgtgtcgcccaggctggagtgcagtagcacaatcttggctcattgcaacctccgcctcccgggttcaagcgattctcctgcctcagcctcccgagtagctgggactacaggcgcatgccaccacacctggctaattttttgtatttttagtagagacggggtttcaccatgttagccaggatggtcttgatttcctgacctcatgagccacctgcctcagcctcccaaagtgctgggattacaggcgtgagccactgcgcccagcccaatctgtctttacttgacgcctgctgtatgccaggcactattctagtccttgggatgcagcagggatgacagtgaaatgggcacaagcccctgccctcagggcatcccctcaggacacctggagcaggacagctgggggactggaggggcatcgagggccgcagagaccctgtgtctgccaacaccatgtcctgggctctgtctgaggcccagatgagttctcctccctgtctccctgagctgtgggcacttccccaacgtgacagaagaggccatggcgggcactgtctgtctgtccctgtgccgtggccgggccggaagtgagagcaccacagagcagggctgtggggtggggggtgctttctcctcgccagctgggggctgttgcagggctgagtggtctccctccctgggtgaccagcaggtgagcctccttcctgccaggtggtgaccccgccagagagagctgggccgccctggggaggctcccaggccccagcccaggtgtgccgctcagccacacattccccgaggcccgggccgcctgccccatgggctcaatgaggctgttgtgggggccgcagcagccgagccaactggggcgccgcttctatttttattctggatttggggacgggtgggccagcccagccagcaatgccctttaaaggctcccctgtgctggcactgcagccagcgagaccttaaaaggcaaagctccctcctgtcgcctgcgaccgcctctgccttcatcgcatcatgcccgagggccagcgtggacccgtggggacaagcggggcagggtctggggagctggcagcgtacttactgctcctggaccgctcagagatgctgaagagctgcttgttgggcagatgtcagtgggcggccccgagatagtgccctggcagctgtccttgcccctgtagccctgagcctggctcacaggaggtgcaagactaggggacaggcctctgtgggtcaaatgcacaagggatgttccctcctcctcggacggccatcaggggaggtgcactggcaggagtgagagttactatgccatgccattgcgcctcctggaaggaaccgcccattcccctggagctggggtgctctcccctcttctgctggggaacaccctaaacgctgtaggggaactgtgacctagaaccgtgtgcctccccgctgccctccctcacgggggcctgtgtcccctcccactctcatgttctgcctcgcagagcacagcagtacaagggcggagctggggtctcaatggaggctggggacgtagctgttgggtgggaggtgcttccccgaccacctgagcctgtctctggagacagcagtcaccccagcacagcctcctggtgggggctccattcctggggaccctcattaccttcccctcttcacatgatggttgttgagactcaggctgggcatatcagagctgcctgcttaggtcagtgaacaaggtgagggttgaactgtggtgcatggcacctccagagcactggccttgcagttcctgagctcaggtgtcaagtggggctgcagatctgtccccagagccacagggtgtgttctcatcctgcactgccatacctggcccctctaaccgcacccccgacaggcacattgtgggtgaggctgacccgggccaccgctcctgcagctccaacacgatctagtcatgaaggggcaggggcagggtcctctgcagaggggccaagcagggagttgctatttataggaagatgcatggcttgggtggattcaaaatctttttttttttttgcatgttttttttgtttgtttgagacagagtctcactcttattgtccaggctgcagtgcagcatgatctcggctcactgcaacctccaggttggtcttgaactcctgacatcaggtgatccacccacctcggcctcccaaagtgctaggattacaggcgtgagccactgtgcctggcctttgcatgtttttgtttgtttgtttgtttgtttgtttttgtgactgagtctcactctgtcacccaggctggagtgcagtgccagtggtctcgatctcctgatctcatgatccacccgcctgggcttcccaaagtgctgggattacaggcatgagccaccgcgcccggcccctttgcatgtttttaatgagcattccgcctactttcctcttgctggctgtgccctgtgttctgtgtccccaggctactgttccccaggccagatcattcctggctggccaaaacacccctcagccactgccagccacacgttgtgtttctgcccttcagggccatgttcaccggcggcatgcgggaggcaagccaggacgtcatcgagctgaagggcgtgtcggcccgtggcctgcggcacatcatcgacttcgcctacagcgccgaggtgacactggacctggactgcgtgcaggacgtgctgggcgcggccgtgttcttgcagatgctgcccgtggtggagctgtgcgaggagttcctgaaggcggccatgagcgtggagacctgcctcaacatcggccagatggccaccaccttcagcctggcctcgctgcgagagtcggtggatgccttcaccttccggcacttcctgcagatcgccgaggaggaggatttcctgcgcctgccactggagcgcctggtcttcttcctgcagagcaaccggctgcagagctgtgccgagatcgacctgttccgcgcggccgtccgctggctgcagcatgacccggcccggcggccgcgcgccagccacgtgctctgccacattcgcttcccgctcatgcagtcgtccgagctggtggacagcgtgcagacgctggacatcatggtggaggacgtgctgtgccgccagtatctgctggaggccttcaactaccaggtgctgcccttccggcagcacgagatgcagtctccgcgcaccgccgtgcgctcggatgtgccctcgctcgtcaccttcggcggcacgccctacaccgacagcgaccgctcggtcagcagcaaggtctaccagctgcctgagccgggagcccgccacttccgcgagctcacggagatggaggtaggctgcagccacacgtgcgtggccgtgctggacaattttgtgtacgtggccggggggcagcacctgcagtaccgcagcggcgagggcgcagtggacgcctgctaccgctacgacccccacctgaatcgctggctgcgcctgcaggccatgcaggaaagccgcatccagttccagctgaacgtgctgtgcggcatggtgtacgccacgggcggccgcaaccgagccggcagcctggcctccgtggagcggtactgcccccggcgcaatgagtggggctacgcctgctcgctgaagcgccgtacctggggccatgctggggccgcctcagggggccgcctctacatctcgggtggctacgggatctcagtggaggacaagaaggccctgcactgctacgaccccgtggccgaccagtgggagttcaaggcgcccatgagcgaaccccgcgtgctacacgccatggtgggtgccggcggccgcatctatgccctcgggggccgcatggaccacgtggaccgctgcttcgacgtgctggctgtggagtactatgtgccggagacggaccagtggaccagcgtgagccccatgcgggccggccagtcagaggccggctgctgcctgctggagaggaagatctacatcgtcgggggctacaactggcgtctcaacaacgtcacgggcatcgtacaggtgtacaacacggacaccgacgagtgggagcgggacctgcacttcccggagtccttcgcaggcatagcctgcgcccccgtcctgctgccccgggccgggaccaggaggtagcccccaagacccccgggaccctggcctgaccgcatgttgtctccaagtggggcttggcgaatgcacgtctgcctgagaaccccagtgccccccttcgcccgggctgcccttgaggggcctgctgcgttgataagcccccctcccaggggtccctccctccctccttcccaaagcagatcctggctgcgagtccatccgagggagcctgccggcaaagcgtctgacatgtggtggcagcaaattcgtccccggggtggtttcctcgcctggcccccgagtccccacgggctggcgggtggaatcccaggtctccagggggtccctgtgcagctccatctcacttctctactgcctcccagccccacggtttcaggcattcagatgtgagctcatcaacattgaacccaaagtcggtggtatatgactcaccctccttccaagtctcctgcgcgcgtgtttttaaaataaactcacccgaaacgtccgtaacacacggacctccaggagcagtgagaggtggcttagaagcccctggtttggggtgggtggaggaggagggcacgtgtctgcctcccctggggtgccctccttcccccatcccaagctgctgaggggaggccctggtcatgcctcagttcctgccttcatctgctttccggaggaaaaaccatatcaactcctagaaacgctccttaggggcttgggaccttccatttggcactgagcatcttgtggggccttaactggctgagacatcccggccctctacatttgccctgttggccaggcagtccccttcccgcaattggagggcgacgctaacttcagaatcccatagtggcgcttgccgcaggtctggtggggtgtcttttttctcctccctcctttccacccctccgcgccctgccactccctggcctgccctgtttttgggtcaacattgctacggagccagcagtgaggcctttcccttcaagggctctgtggtatctctggccacatttgttctaatgtctgaacctctaaatcttttctttttgattggttttactgtttttaagaagccagcactgctgtctcatagatgggatttgtactcttggggcaacttaaagtgtctctctcgctgctaacagacgattgatgtcttgtctctgtgacccactcaccatgtaaagaattaacctcctatcttagcagacatcgtctcctaatatttccctttatttaataaaaatgttatggtgaagagatggagccggcccagcactgagcttgtgcggcttgggtctgattggtcacagattcctcgtgtgtcctccgcgtgtctgggggctcctctcccccgcctcaaccttttccagcctttcagaggagtcggcagtgggctgggctttggctcaggggcgcagaggcagcaggaagcgtggccaggactttcaccctggcgttttttgttgttggtttttttgtttttttgagacggagcctcgctctgtcacccaggctggagtgcagtggcgtgatctcggctcactgcaacctctgcctcctgggttcaagcaattcacctgcctcagcctcccaagtagccaggattacagacgcagacacacaccaccacacccggctaatttttgtatttttagtacagacggggtttcaccatgttggccaggctggccttgaactcttgacctcaggtgatccacctgcctctgcctcccaaagtgctgggattacaggtgtgagccaccatgcccggaccaaccttggcactttggaagagccttcagccccctattctcatcatggccggccaaactatgaactgggctgcccagagcaggccacttatcagttgcaggttagcagagaaagcctgatgttcccggacggccttcccagaagggaggccctgggatatcacacacacatggatctccataagttgctgtgcctgcatgcctggcgctcctgtgtggcagccatcggggctggggtaacactagaggctgagggggtgggcagtgctaaaataggaacatggttgggaacctaaaagaagcccacactgtcaggggcatcgagacaaaagccgagttccctggggacttaccagaacattccagccccacccccgacctgagctcccccaaagagaacccttccccactggaggcatggccccttcaggggagcagtgagaagctttgccagctgcaagtcccctggatcagctcacacctcagaacatcttgtccccagtgagctggcaggggcgccggcccagggcggggggcgctgctgtatctaaccggatcgattgtgcataaccgtctaggccggttcgtggaatgttcgtggggccccctgcccctccctcagcctccccccgcatccccccaagaaaggaaaattatttttcgtattgtaaactttaaacatgaaaaagctgtttttaatttagcagaaactggcttgaatcttcactttgtgaacgtttgtgtccttcagaggcagaatatgcctgcgcacactcgcacatgctcatgcacacacctgcacacgcatgccgcaacacgcacattcacatggccgtgctcgtgcacgcctgcacacgcatgcttgcccatacccacgcattgcagcgcgttcacacgctcacccgcacacagtgaaacacaagctcacacatatgcacacacacacatatctgtgcatgcacccctggaccagcgtagcccaatctgcctggcggcccaaaggggtctggagcccggcaccgccccgagcctgggggaagcctgtctacttccagatgccctgcctactcgctgaggcctggacgccggctgcaggagcctcccttgcacctgggctcaggctgtgggaaaacgctgtctctcgggacggtcagatgcaggcccgcaagagggaggccaagtgcgacttctggggcctctcagcaagtgagggccaagggggcctctggggagccgtgtgaggtgggaatccgccccggacctggccagcttggaaacctgcccctggctctgtctccgaggaagcagctccagctcgtccgttctcacgggccctggagattcactttgcacggtgcagcctcggaccctgctcttcctcggggcgcctgaccgtggatctcagcggcctggcgcctaacacagagcctggcaccgacggagcatagctcgaatgtttgctgcacaaaggagaggtgctggggcgggaaggtgagggcagccttcttcacactagtggccgtgggcaccttctgtgtgcaaaccccggggaaaggagggcaccaagccgtgctccacccccagcaaggcccctgctttgttctcgtcttcctgtcgctctcattctggtggccagccgggcagccattcctccctcctcaccatcagatccctgatttggtgccagcagcaacgtgcccagcctctggggttaagattcagctgagccgttcttggcaatgccttttgccggggttgtttgtaatctgggcgtgtttcccagctctggccagcaagcttgaaggggtcgggtgtttctggacaagggagagagaggccttgttgcccccttcccttccttactgcttcttatgaggacacaatgccaggggcttctgcagccatcttgtggccaggaggagcaagttaagagagcacactcaggctgggcgcagtggctcacacctgtaatcccagagctttaggaggccgaggcaggagggttgcttgagtccaagagttcaagaccagccctgagtgacatagtgagaacttatctctacaaaaaaaaaaaagctcgtcagggtgacacacgcctgtagtcccagccactcagggaggctgaagtgggaggatcacctgagcccaggagttctaggctgcaaggagctgtgattgtaccactgcactccagcctgtttttctgagcctggttttccagccttctcatcacttctgtgagctaccaaacaattttttttttttttttgagacggagtctactctgttgcccaggctggagtgcaatggcaccatctcaattcactgcaacctctgcctcctgggttcaagcgattctcctgcttcagcctcctgagtagctgggattacaggtgcatgccactactcctggctaatttttgtatttttggtacagacgaggtttcgccatgttggccaggcggtcttgaactcctgacctcaagtgatctgcccaccttggtctctcaaagtgctgggattacaggcgtgagccaccacgcctgggcttttttttttttttttttttttaaatagagacagagtctcactatgttgtccaggcgggttttgaactcctgggctcaagcaacactcctgccttggcctcccaaagtgccgggattagaggcatgagccaccatacctagccaaccaaccagttttgcaatacacacattggctatttaaattgtccaggctggatgcagcggctcacgcctgtaatcccagcactttgggaggctgaggcaggcagatcacttgaggtcaggagttcaagaccagcctggccaacatggtgaaaccctgcctctactaaaaatagaaaaattagccaggtgtggtgattaatgcctgtaatcccagctactcgggaggctgaggcaggagaattgcttgaacctgggaggtggaggctgcagtgagccaaaattgcaccactgcactctagcccgggcaacatagcaagactccatctcaaaaaaaatttaagtaaataaattgtctagagtcagtttctgttgcttacaagtaaaaaccctgacatgagatgggaatactccagcatctgtcacatttacattataattttggaactgcttggtgacaagcatatctggccattagtgttttctgcagtgcagacattatttctcataacaaggagactggaggtcagaggtgccaggatgttatgactggtggcccatgatttctgggagggggcatgactatgcctctctctttctttctttctttatttttttttggtttagagactgtattcccagcactttgggaggctgaggcaggcagatctcttgagctcaggagttggagaccagcaacacagcaaaaccctgtctctacaaaaaatagaagaattagcctggcatagtggcatgcacctgtagtcccagctacacaggagggtgaggtgaggataggttgagccctgaagatcaaggctgcagtgagctgtgattgtgccactgcactccagcctgggtaacacagtgagaccctgtctccaaaaaaaaaaaaaaaagaaaaaagaaaaaagtaaacaagggaatcaaaggcgtgaggcaactaggccttcagctgaaattatgccagaggacgatcctgccaccactgcagaatccagacgcctccgttggcactgccatctgccctgggcactcagccacagctgcccctagaaaacagatggccctgccccgatgctgtttctctgtagcacttgtgcctgcatggaaacatcccggaggcccaaccagtatcccacgccattccccagctgtcccaggagtggtgaaagtgagtacattcgtgtgtattagtcagccactgctgtgcaacaaacacccccaagtctcaatggcatgcaacaataagcgtttgtttttcacatgtctgtgagtcagcagaggtggtgtctgctctaggcgggcctcggctgggcagctctgcttacaggtgcaaggatgcagagtagcccagagtccctgctccacgggttcttgcctcctgctggaacagcagctagccagggcacattttcctcctgcaagtgtctgaggacaagtggaatcacgtgaggcctcgtagggtctcagttcgggactcaaacactatcacatctgcccgtaagtcttttttttttttattttgagatggagtcttgctctgttgcccaggctggagtgcagtggcacaatcatggttcactgcagcctcgacctcctgggctcaagtgatactcccaccttagcctcctgactagctagaactatacgctcatgccaccaagagcagcttattcatttatttatttatttgagactgaatctcgctctgtcacccaggctggagtgcagtggtgcaatctcggctcacagcaacctccacctcccaagatcaagcgattctcttgcctcagcctctcgagtagctgggattacaggtatgtgccaccacacctggctaagttttgtatttttaatagagacggggtttcgctttgttggccaggctggtctcgaactcctggcctcaagtcaaccacctgccctggcctcccaaagtgctgggattacaggcatgagccactatgcctgacctgcccataagtctttggccaagcaaatgacatggctgagccccacatctggaatggggaagtgtcttccacctggaaggaagaactgtagagggcagggatgcaggaataggtgggaaccgcggccaatagttcgatgggtcacccttggcttgggggcctctcttgttagcagggtgaccaacttccctctgtggggggactccccaaacttggatggggaccctgatgctggcaaccaaaaagaaaggcccgttctgcatctccttagcagccactgccccctggaggtcgagatatccctcttttttgtttgtttgtttcaggtgagtgggggctgtgagtgccccaggatcttggaaagcaggatgggggtctggatgtagggaggtcaatggggccttggccaagtttcagggcatggacactgtaggtgtccctgggagcatgcccaagtctctctatgttgcccaggctggtttcaaactcctgagctcaagcagtcctcctgcctctgcctcccaaagtgctgagaatataggcacaagccaatgcatccagccaaccaaccagttttccaacacgcacttcagctatctatccctcagcacaagtggctgggtccctagacttgaaccatgggtcccccgcctgcccagttccagcctctcactaccctccttggcggcccaccccgtcccaccctccatccaccactaaagcctgggtgggaggacgaggggcctgggtcctcctgtaaccttatcgtaaggaggggcatcgctggcttctcttgggtcctttccctctctcttcatgatcagacccagcttttgctttgccctttaaaaactctgtacgatgagagcctcttttggaagtcaaagacagaccagggattgttttcctctttgcctctcagctccaatggccctaattcacctccacacgacgtgggtaccccaaatcgactaagatcccatataaggaagagctgagaagcaaagcatgaaaactaacatggcgaagtagcgttttgctttcctaacagttgctgagtgcttggatgaagcaggcactgagctaagtgctttccatgtgttatctgtttcatctttccaagagcctgctatgaggagcaccactgtccacatttagcagaggagggcagtgcggctcagagaggtgaagacagttttccattgtcacacagcttgacaactgataagtgttggaccacacagaaatgctcaagagtttcttgatctcccgggtcaagcaattctccttcctcagcctcccaggtagctgggtttacaggcgtgcaccaccacgcctagttaatgttttttttgcatttttagtagagacggtgtttcaccatgttggccaggctggtctcaaactcctgacctcaggtgatccgcccacctcagtcccccaaagtgctgacattacaggtgtggaggtggaggttgcagtgagccgagttcgcgccactgcactccagcctgggtgacagagcaagactctgtcttaaaaacgcacaaacgaatgaacaaaaacacataagaaatcacgtgtgtctgtgccctttccacattccacaggcacacagggaactctggcctggccctggcctctttgggaaaggcgaacataatctcagctcaatctacaagggatcagatgagaccgcacaaacagctgccttcagagaatgggatgtttctgggtcatgggaagagacgctggaggtccacttcagctagacccttcaggagggtctctcagagcagaggcctgcaagtcgagaaggagccagccacgaaagcatcttggaggagcgcaatccaggcagagggaacagcgaagaggcccgtgtggctggagcgagagccgagccgagcataagcatgtggagccgccaggaggagggtattttttttttatttgagatggagtctcactctgtctcccaggctggagtgcaatggtgcgatctcggctcactgcaacctccacctcccgggttcaagcgattctcctgcctcagcctcccgagtagctgggattacaggcacccaccatcatgcctagctaattttcatttttttttttttttaagagacggggtttcaccatgttggccaggctggtcttgaactcctgacctcaggtgacccacctgcctctgcctcccaaagtgctgggattacaggcatgagccactgcgccaagcctttagattttttttttttttaagtgcgatgggagtgtgggatctgccctgctttgcaaagcccgcagggctgctgtgaggagcagtgttggaccacactgggtgacagcaagttcctttgatgaaggaagaaagtgaaaacctcagggttggtttctgcccgggtcactggacactgaagcctcgcccttctcagggctgggggtcagtggagcaagaagcggggcttgggctgctgtctggccattgcacaatgagcgggctggctgcttcctctgactcatcaccagggtttaggatggatcaagtttcatgccaggcgggccgcggggtgaatgggggtgagtaggaagagcagcagacttacttctgcacatgcccaggatggctccttgctgtaacccctgctagtccccaaaatcttttctcttccatcttcctgtgtctggaaactggcttagtgcagatatatgtaagtgatcagggtaagtggcatttatggagcacctcttagtgagacacatattaacatatgttaacatactaacatattaacgtatgttgacacatacgaatttcatttaaagcctacagggccaggtgcagtggctcacgcctataatcctagcactttgcgaagccgagccaggaggatcacttgaggtcaggagttcgaaagcaacctggccaacatggcaaaaccccgtctctactaaaaatacaaaaattagccgggtgtggtggcctacacctgtagtcacagctactcaggaggctgaggcaggaaaatcgcttgagcctaggaggtgaaggctgcagtgagccgagatctcaccactgcacgccagcctaggagacagagcgaaactccatctcaaaaaaaagaaaaaattagctaggcgtcgtggtacacccctgtaatctcagctactcgggaggctgaagtaggaggagaattgcttgaaccagggaggcggaggttggaagttgcagtgaacagagatcgcaacactgtactccagcttgggtaacagagcgaaactgtgtctcaaaaaagaaaaaaaaaaaaagatacatgtaattgattagggtaagtggcatcaattacggagcacttcttagaagtaaggcagttgacacttattaacttcatttattttatttatttatttatgtatttttttgagatggagtttcacttttgttgcccaggctggagtgcaatggcgcaatcttggctcactgcaacctccacctcctaggttcaagcgattctcttgcctcagcctcccgagtagctgagattacaggcatgtgccaccacgcccggctaatattgtatttttagtagagacggggtttctccatgttggtcaggctggtctcaaactcctgacctcaggtgagccgcccgcctcagcctcccaaagtgctgggattacaggcgtgagccaccacgcctggctaacttcatttaaagcctacaaaactcagtgtgtgaaagcagctgaggtcggctgtgaggcctgagttttggtgcataagttgctagggcagctgctgtccctgctctctgtctttatttcttctctgacctcacaggatgctgtcaagaactagaagccggtcaggcgtggtggctcacgcctataaccccagcactttgggatgccaaggtgggagtatcatctgaggtcaggagttcgagaccagcctggccaacatggtgaaaccccatctctactaaaaatacaaaaattagctgggcgtagtggcgcacgcttgtagtcccaggtactctggaggctgatgcaggagaatcacttgaacctgggaggcggaggttgcagtgagccaagatcgtaccactgcactctagcctgggagacctagcgagactctgtttaaaaaaaaaaaaaaaaaaaaaaagaactagaagccacatatgtagcgggcccagtctcgcattggactcacagaagctgcagtctcagtcagaaccaggaacagaaaaaggacttgaaatagatttaggcaggccaggcacggtggtgcacacatgtaatctcagcactttgggaggctgaggggggcggatcacttgagcccaggagtttgagaccagcctgagcaacaggatgaatcctgtctctacaaaaaccacaaaacattagccaggcatgatgatgcacacctgtagtcccagctacctggaaggctgaggtggggggatcacctgagcctaagggttggggcttcagtgagcatgatcatgccactgcactccagcctgggcaacaaagtgagaccctgtctgaaaaaacaaacaaacaaacaaacaagaaaacaaatagacaagcacaaaagggaataaatttttggcctacataacttaaaaggcaggtgagtctagcttcaggaatggctggatccagaagctcaggctggagtacagtaatgtgatctcggctcactgcaacctctgcctcctggattcaagctgttctcctgcctcagcctcccaagtagctgggattagaggcatgtgccaccatgcccagctaattttgtatttttagtagagatggagtttccctatgttggtcaggctggtctcaagctcctgacctcaagtgatccacccaccttggcctcccaaagtgctgggattacagttgtgagccaccgtgccaggcctggttctgttttcctctgtgtgggtccactcttttggcccagctgaactaatcttttgtttttttttgagacaaagtctccctctgttgcccaggctagagtgaagtggcgctatcttggctcactgcaacctccacctcctgggttcaagtgattttcctgcctcagcctccccagcagctggaattacaggcgtgtgccaccgcgtctggctaattttttttgtatttttagtcgagatggggtttcaccatgttggccagtctggtctcaaactcctgacctcaggtgttctgcccgcctctgcctccaaaagtgtagggattacagtcatgacccagcgcccagcctgttttttgtttgtttgtttgtttgtttgtttgagacagggtcttgctctgtcacccaggctggagtgcagtgcattatcatagctcactgcagcctccatctcccaggctcaagcaatcctcctgtctcagcctcctgagtagctgggattataagcaggcatcaccacgcgcaggtaatttttttatttttagtggagattaaatctcgctatgttgcccaggctggtctcaagctcctgggctcaaatgatcctcctgcctcggcctcccaagttctgggattacaggcatgagccacaacacccagcctggcctgaaccaatcttgatggccagcacaatgggctatgctgattggccaagacttccaccttagggaggggtgtttgtgtggtgggagagtggtgagaccagccattcacatctcacagactgaaagtcagaaccagtgttccccaaataagggttgttgacactaaaaagttgagggagtgggtggggttgagagaaggaatatgcttgttaggcaaaaagtataggagcttaccaaagtgcgcaaaatcatatcaagaaggaagatggccgggtgcggtggctcatgtctgtaatcccagcactttgggaggctgaggcgggcggatcacctgaggtcagaagttcaagaccagcctggccaacacggtgaaaccctgtctctactaaaaatacaaaaagtagccgggtgtggtggtgggttcctgtaattccagctacttgggaggctgaggcaggagaatcacttaaaccccagaggcagaggttgcagtgagctgagtctgtgccactgcactccagcctgggaaacagagactccgtctcaaaaaaaaaaaaaaaaaaaaaatcccataaaaattagctgagcatcatggtgcatgcctgtaatcccagctacttgggaggctgaggtaggagaatcgcttgaacctgagaggcagagattgcagtgagccaaggttgcgccactgcactctagcctgggcgacagagtgagactctgtctcaaaacaaagataaagtagggcagtggcaatatccaaggcattctaaatgaaaatcgatatatatatatatatatttaacatgagcattttattacctgttgtaaagcatgaatcaaagcatgtttggaagatgtcagcatcccctccagccatcctcagtccaataaaatgtgtgcttgttgtgccattagagccatcatcaattcccccagctgaccttcctagcttccacccagcccatactctgaaatccctgcagcctcctgaatataaactttcaatattggtggttgggggtccctctcttgagggagggagggttagagtccctcctgcttccctggcttaccactctgccatcgggggagtctctgctccttccttcactgctgagtcttgatgggatttctggacccttctgttagcaccttgttgcaaaatagagatccttgaacaagactggactggagaagtatgcagagggaaggctgaagctctgtaactccagttctttgggctcaggtatccagagaatagcaatatgcccattgcaagggaatgggaaaaagtagtcgtcggctggacatggtggctcacgcctgtaatcccagcacttagggagggcgaggcgggtggatcacctgctgtcaggagttcaagaccagcctggccaacatggtctttagtctctactgaaaataaaaaaattagctgggcgtggtggcgcctgcctgtaatcctagctactggagaggctgaggcaggagaatggcttgaacctgggaggaggaggttgcagtgagccgagatcgcaccactgcattccagtctgggcgacaagggcaaaactcggtctcaagggaaaaaaaaaaaaaaaaaagaaagtcgttaagggcaacagctaggtttatggactgagagagccgattgcagggttcaggtcttagctaagataactttccgcctccctgtctgtggtggctgcaggagcctccctccctaatgttctgtggctggccactggtcttatttaccgcatcacatttacctccatctgaaaagttcttggttatttgtgtgctatgtctgccccctctctgactgtacactccataagggcagggatcacctctgcttgttcacgcctgtactccagtttgcctggcacatagtaggtgctcagtaaatattccttgaatgaatgaatgcatgagtgaccaacgccctagtctgttttcagagctcttagtccaaacccaggttcaacttggggtgccaccaatccttgcgggggggggtgcctggccccacccttgtgaattgggaggatctgggtcaggccgtctccctcttgggggctccagtgccccagccgatccgcggtccttgtccaacagcccagaggccgctgtccagcgggccaggaggcggatcactgcgtcggcgttgaaatttccactcgcgctccaccgcccttcccgcgggccccgagcgcgcgcctgggcgcgcgcatgcgccttcgcccccgcgccgcgcgccgctcctgtgcgcctgcgccgcgctcacgaccgccggcgcgcctgcgcactgctcgccgcccgtgggcccagccggcgcttgcgcggtggcacgggcgagtgggggggcgaggaggtggaggaggaggaggaggaggaggaggtggcggcgagaagatggcgacttcgaacaatccgcggaaattcagcgagaagatcgcgctgcacaatcagaagcaggcggaggagacggcggccttcgaggaggtcatgaaggacctgagcctgacgcgggccgcgcgggtaagggggctgcccgcgccgacccttcagggccggcggagggagggagggggcgcgtgtccggcgcgtgcacggggcggggtgggggggggcgcggcgggggcggggcgcgcgcggcgggggcggggcttggcacggcccgagggggacaggtgtccccacgccccgggcgtcgtgggcgggacaggtgaccccacaaaatccatacctgatggggtacaggtgccctgcatcactgctccccggaggagacaggggcctctatatcattactactaggagggaacaggtgctagtacctcgtcgttacctgacaggggacaggtgtccctacatcattgttacccgagggggacaggtgccccacattattactacctggaagggacaggtgcccccgcatcattgctacctgggggggcaggatgacacaggtgtatgagctgggtgctgcttgcaagcaccattggtagctgggggtgagggtgcaagtgcccccgcatccttgctacctgggagggacagatgccctcccattcttgctacctgagggggaccggtgtctctacgtcatggttacctgtgcctttactccctgggtgttgggggaggaacggatgtccccacttgcagagctgaggtgggacagggatctctccctcttggacagctgagggaatggtcagatcctgtcccccagggggtccagaggggggccaagaaggcagattgtgctcagtcctggaacttggagtggagacagctgccccttctccatgtagcccatatggtgggggccaggtgatgttcctcccagtggaacaggggatgctgaccacagcccctgccctctcaggaccagggtggagggccaggtctgcctcaggtggctgggcgcatttggtgtgcaggggcaggccaggttctgccaggctcctgtctggcagagcagataccctgcaaatctcacctgggaagttgctgtgggccaggagcaggggcttggggctggtgtctgagcacggcaaggcacccgagttcctcaggcctcagtttcttgtcaggcattctagcaagaccttcctcttggggcagggtggtgagcacactctgcaaaggtgatgctgaatctccactttgttcttgcagtgtggtgagacctctctcctgcatcctggggccttggggagggtttgggtgggctttgcagatgctcgtatccctggtttccagattcagccactgatgtgactggctcaggtagacttaacctcagtctctgattccttaggtagcactttcagtctgtgttactttgtaactagttgtttgtttctctgagagattgtgaccttatagactaggatttgtgtcttcatttctgtgttggtaatgattgggagctcactgtcacccaggtactgctttaggcatgctcggtgagtgtgccacatctgtcctcccagctccaagcagctacattcttgctcaggatgtagagaaagagatggctggtgaatgaatgaatgaaaaaaaaataagaaaatggccaggtgtggtggctcatgcctgtaatcccagcactttggaaggctgaggcagtggatcacctgaggttaggagttcgagaccagcctggccaacgtggtgaaaccctgtctgtactaaaaatataaaaattagccggacgtggtggtagctacctgtaatcccagctactggggaggttgaggtgggagaatcacttgaacctgggaggtggaggttgcagtgagccgagatcatgttactgtactccagcctgggtgacaagagtgaaactccatttcaaaaaaagaaaataagaagaaagtgtgcaacttgagcatccttccacgtgagtgtcccccacatatcagggcttctgaggcaggagtggccacttctttttgtctccagcacatggtgtgtgctggcatgcagttgttgtcaaatgtttgcagtgtgaccggaagaaaggggtcacagtaggttcatgggtgtcattctgattagaagtccagtttctgcgtgggattggaaatagattattgttgttgaaaacatctctttaaaataatagctttattgagatatgattcacacatcatacaatttacttgtttaaagtgtacagtttggtggtttttagtatattcacagagttgtgcaaccacccctattttgtaattccagaacattttttatccacccagaaagaaaccccgtccccattaacagtcactccccattccccctcccctagcccctggcaagcactaagctgtcttctgtctctgtgggttttcctattctgggcattttatataaatggaatcacacaacacgtggccttttgtgactggcatctttcactcagcgtcatgttttcaaggttcatctctgtagtatcatggatcagtgcttcgttcctttttagggtcaagtaatattccgttgtatggatatattgtatttgtttatccattcatcagtcaatgaatttagaaaaattctgaggccaagtgcagtggctcacacttgtaatcccagcactttgggaggccaaggtgagtggatgacctgaggtcaggagttcgagaccagcctggccaacatggtgaaacccgtctccactaaaaatacaaaaattagtcgggtgtggtggcacatgcctgtaatcccagctactcgggaggcttagacagaagaatcgcttgaacctgggaagtggaggttgcagtgagctgagattgtgtcactgtactccagccttggcaacagagtgagactccatctcaaaacaaaaacaaaaacaagattctgaagatatgcaggtggcagttctttcagccctggaaaccatttcccatcttcctcatcacctggggtcaggggagcatgggctctgggcagaggtgagttcacactagatttttagacacaaagcattgttctctttctggggcagggggtgattctgccccccaggggacacttggtgatgtctggagacattttgggtcatcatgattagggagtgcttctagcatctggtgggtggaggctgggatgctgcccaaccccctacatgtagtgcacaggatggccccatcgtgtggaataatctggccccagatgtcggcagtgccaagactgagaaacttttttttttttttttttttttgagatagactcttgctctgttgcccaggctggagtgcagtggcgcaatctcggctcactgcaacctctgcctcccgagttcaagtgattctccttcctcagcctcccgagtagctgggattacaggcatctgctaccatgcctggctaatttttgtatttgtagcagagatggggtttgtagtagagaccatgttggccagactggtctcgaactcctgacctcaggtgatccggccacctcggcctcccaaattgctgggattacaggcatgagccactgtgcccagccaaggctgagaaacttttgattagaggtgtaacagtgaggtgggccagggtgtgagctttgcacctggtcaggtagagttccatcctttgctcccacctatatggctgtgccatctctggcaggctgcgaccagggtgggcaagcttattcccagtttgactggccactgcacagtccaagtggcatgtccgccgtgcctggagcaggtgaatgaacctatatgatgtgggcttccctcctgcagccatggcgcgctgcctcccatactgtagacagcaggggtttggccacacctgcagccaggtgaggcatgatcgggtcggcacctgctcctctcctttgaattccaaaggacagcatgtcactcatgcgtgtctgttcacagttgccggtggtgatggcacctgaggtgtcttgctgccgtggaaggccagtcagcagatgtttggctagaagacagggacctcaccagggcacaagcactgaagggttgggggacagggcgtaaagtcgggagactgtttgcaggtcttggggcggaggggtgggtgtgtgggcgttccctcccactcttaggcttgggtcagcgtgacaggcaggctgtctatggcgctctgctgtgtgacactgggtgggtttctcaacccctctgggccgtagaatcctgagttgtaaagttggggcagcgcgttcattccatcaaatgacaattttcattgtctggcatgtctcaagagcctggggtgctggggctcctgcagtgtacagggcatacggggctgtgttcttggggagccagcatagttttaggggggacaggagagcatcaatgcatccgaatgaagcagacgccctcagaaggtggcacacgctgggagagaagtggctcagccacgtgctaggagtggctgggacaggggtgacacagcatccccagagagcagggaagagcacttcagattggggacaggcacagtcagagccttgtggtgggaatgacttggcgagtttgagaatgggtggaaagcagggaggagggcaggtgaggctgcaagagcttggatctcccctgagggaggggtctgggaagcctccctgcttgttttgtttgtttgtttgtttgtttgtttttttgaggaggagccccccctgtcgcccaggctggagtgtggtggtgcgatcttgactcactgcaacctccgcctcctgggttcaagcgattcttctgcctcagcctcccaagtagctggaattgcaggcatgcaccaccacgcctgagtaattttgtatttttagtagagacggggtttcaccatgttggtcaggctggtcttgaactcccgacctcaggtgatccgcccacctcggcctctcggaatgctgggattacaggtgtgagccacggcgcctggccccgcttgtttttgtaacagctttattgagatgtcatttccatggcattccgccactcagtggcttttagtatattcacatttgcacagccaacaccagtcaacttgagaacatttcgtacccccagaaagagaccctgtccccatcaacagttacttcccactcccccttgcccagcccctggcagccacaaatctgctttggttgcttgctttctttttttttggagacagagtctcagctctgtcacccagtctggagtgcagtggcacaatctcagctcactacaacctctgcctcccggattccagtgattctcctgcctcagcctcctgagtggctgggattacaggcaggtgccaccacacccggctaatttttgtatttttgagtagagacagggttttgccatgttgggcaggctggtctcgaactcctgacctcaagtgattcacccgccttggcctcccaaagtgctgcgattgcaggtgtgagccaccacacctggtcaactaatgtggtttctgtctctatggatttgcctgttctggacatttcatatcaatagaatcctacacagtgaggcgaatcctgcaccatgaagccttttgtgtctgccttcttttacttagcatagtgacttcaagcctctaacttggatcagtgcttcatttctttctttcttttctttttctttcttttttttttttttgagacagagtcttgctctgtctctcaggctggagtgcagtgagccaagattacgccactgcactccagcctgggcgacagagtgagactccatctcaaaaaaaaaaattgatggccatatatatatatatatatatatgtaatataacacttaccattttgacgttttttaagtataaaattcagtggcattaagtttattcccagtgtggtgcaccgtcaccggcatggctcagtaatagttcatgtcatattccatggtgtgggtctaccccgttttgtccattcatctggccatgaacacgggttgtttccacctttggctgtcgtgaatcatgctgctgttggcatctttgtccacgtttttgggtggatgtatatcttcatttctcagagcatgtgctggggagtagagttgccgggtcctctggtaactctccatttatccatttgaggacgtcgtgtgtctcaggaggatagctgtggctgtgagtgggatgggtgtggtgtgagcatccgctgcaggtgtccagatcagggggaatgatagctggagcaagggggtgacagagcgggtggatttggtggcatttctgcagcagagccacccagacgtgctggaggattggatgttgggggtgaggggaagggaaggggggagtgtcgtctgcttgccaggggttcaggacattggggattcctcgtatgactgatcattgatgacctcagacagcaacacctgggccagaaaaagtacccaggcaagacagtcatggtggcacggtcagggctgaaggagggcactctcctgctgttacctactgtgaagctggagtaaaacgggcccctgggctgcaggcacagcgcagtggtggctcaggttagctgagtgtggagcccgccccccagtcctggctttggcgctatttgtttctgtgccggctgcttcagctgtctgctgccatccgcagcctccatatacaggcaggactccctgagctgctccctgaacaaaaggtggggcaagctgccctcatcctcatcactctccaggcccctccaaaaagctaagctgtctcagtactccccaggttgtgagctgcatgccctgcagcaggctgagtggtggcccctaaaaagcatctgctcaccttctagccctgtaacccgtgaattggaccttagttggaaaaaaggtttctgtagatgtgattaaggtaaggatctggagatgagatcatcctgggggggtggccctaaatccggtgactggtatccttatgaagagtgggccatggctgggcgcagtggctcactcctataatcccagcactttgggaggccggggtgggcagatcacgaggtcaggagatcgagaccatcctggctaacatggtgaagccccgtctctactaaaaatacaaaaaaattagctgggcgtggtggtgagcgcctgtagtcccagctactcgggaggctgaggcaggagaatggcgtgaacctgggaggcagagcttgcagtgagccgagatcacgccactacgctcgagcatggatgacagagcgagactccgtctcaaaaaaaaaaaaaaaaaaaaagaagagtgggctgggagtggcgatgcatgcctttaatcccagagttttcagaggccgaggcaggaggattgtttgagcccaggagtttgaggttacagtgaattataatcactccagcctgggtgacagagtgagatcctgtctcaaaaaaaaaaaaaagaaaaagaaaaaggaaaagatggagggggaccaggcacagtggctcacgcctgtaatcccaacattttgagaggctgagatgggacgataacttgaagccaggagtttgagaccagcctgggccacaaagagggaactcatctctacgaaaaaaaattgttttttaattagccgggtgtggtggcgtgcacctgtagtcccagccacttgggagggtgaagtgggaggatcacttgagcccaagagttaaggctgtggtgagccatgattgtaccattgcactccagctggggtaaaagagtgagacccttttctccaaaaaaaaaaaaaaaaaaaaaagacaagaaaggacacagagacacaggggagaggaccatgtgacaatggaggcagagattggagcgatgtggtcacaagtcaaggaatgcccagagcccccagaagctggaagggataggaagggtcttcccctagagcctctggaggaagcatgggcctgccggtgcctcttttttttgttttttttgagatggagtctcactctgtcgcccatgttggagtgcagtggcgtgatctcggctcactgcaacctccttctcccgtgttcaagcgatcctcctgcctcagcctcccgagtaactgggattacaggctcctgccaccacgcctgggtaatttttgtattttcagtagagatggggttcatcctattggccaggccgatctcgaactcctggcctcaaatgatccacctgcctcggcctcccaatgtgctgggattacaggtgtgagccaccgcgctcggtcttccccacccccactcttaggacacaatccatacccgaacactgagctcctacactccaaccccgaccctgtggtcctgatcctccaccccaggccctgctcttgctgtctccctctgtctcatccagtgtagagcaagggcccctgctactaaaaagggctgaatgaagggtccactccgggcctcggtggtaaccccacacaaaacctgcggagccagctggagctggctggacttatgcatctgcaagcggctgcagccctgtcctgatgtgaagtccacaaggttacctggtgctacaggttctgtcaggcccggggttccttgccactggctaaagtcacaaattaccacaaagtgaggggcatgaaaaacagaaattaattccctcaccgtcatcaatatgatgaaaccccgtctctactaaaaatacaaaaattagctgggcatggtggcatgcacctgtaatcccagctactcaggaggctgagacaggagaattgcttgaacttgggaggtggaggttgctgtgagcagagatcatgccattgcactccagcctgggcaacaagagtgaaactctgtctcaaaaaaaaaaaaaaaagaagtggttagggtgtgcagcgaccaggtccacgtgctctggggaatctgggagggcttcctggaccctcagcgtgtgtgaaaccaggggctgcagggctgggtgaggagcagatgtccctggctcaggaacaggcatggcacttgtggctctgcagttagaaattcatttttctgggccgggcacggtggctcacgcctgtaatcccagcactttgggaggccgaggcaggcggatcacaaggtcaggagatagagactatcctggctaacatggtgaaaccctgtctctactaaaaatacaaaaaattagctgggcatggtggcacgtgcctgtagtcccagctactcgggaggctgagacaggagaatcgcttgaacctgggaggtggaggttgcagtgagccaagatagtgccactgtactccagcctgggcgacagagcgagactccgtctcaaaaaaaaaaaaaaaaaaaagaaattcatttttcggccgggtatggtagctcacacctgtaatcctagtattttgggaggccgaggtgggcagatcacgaggtcaagagatcgagaccaccctgggcaacatagtgaaactctgtctttactaaaaatacaaaaattagccaggtgtggtggtgtgcacctgtagtcccagctacttgggagggtgaggcaagagaattgcttgaaccagggtgctggaggttgcagtgagccgagattgtgccactgcactccagcctgggtgacagagtgagacaccgtctaaaaaaaaaaaaattcatttttcatggcttgccagcacctaccaccaaatgtgcaatcaagacaggttttaccaaggagcttaactcttttgtttttgttttttttttttttgaaacagagtttctctctgtcgcccaggctagagtgcagcggtgtgatctcagctcactgcaagctccgcctcctgggttcacgcccttctcctgcctcagcctcctgagtagctggggctacaggcgtccaccaccatgcccggctacttttttttgtatttttagtagagacagggtttccccatgttcgccaggatggtcttgatctgatctcgtgatccacccgccttggcctcccaaagtgctgggattacaggcgtgagccaccattcccggcccgcttaactcttactgtttgcaggcacactgatgtactctgttttgttctaatatgaaaattagcctgggctgggtgggcacagtggctcacacctgtcatcccagagctttgggaggccaaggcaggtggaccacctgaggtcaggagttcgagccagcctggccaacatggtgaaaccctgtctctactaaaatacaaaaattagctgggcatggtggcgggcacctgtaaccccagctattctggtggctgaggaaggagaatcgcttgaacctgaaaggtggaggttgcagtgagctgagattgcaccactgcactccccagcctgggtaacagagcgagactccgtctcagaaaaaaaaaaaaaaaaataggctggcatggtggctcatgcctgtggtcccagctacttgggaggctgaggcgagaggttcccttgagcctaggagcttgaggctgcagtgaactatgatcacgccacttcactccagcctggccgacagagagactccatctcaaaaaaaaaaaaaaaaaaagaagaagagacgaagaaaaaaataaaaagtaccagttgggacccactgaattgataacttactaatccagagctctgtaagctacgtctctttattttattagaacatgggcacaaccatttattccttttttgtggctgcttttgtgggacatcagcatagtcccatgcaacagagatcatgcggtccactgtggctttgacctcctgggctctagcgatcctcccacctcagccccctgagtagctgggaccacaggtgttagccaccatgcccggctaatttttttattttttgtagagacagggtcttctccctgtgttgtccaggctggtctcaaactcctgtgctcaagcaattgtcccatcttggcctcccagagtgttgggattacaggtgtgagtcactgcgccaggcgcatctggcccttcacagaagggattggctggcctctgggactcacacacagtttgaaacccactgacctcaagtgttaaggaagatcagctgcaggggctgggggtggttagcaaggagagtgaggttggcggcagttctcccactttcagcgacctctttttttttttttttgagagagggagtcttgctcctataagatcttggctcactgcaacctctgcctcctgggttcaagtgattctcctgcctcagcctctcaagtagcggagactataggcacgcgccaccatgcccagccaatttttgtatttttagtagagatgaggtttcaccatgttggccaggctgctctccaactcctgacatcaagtgatctgcccgcctcggcctcctaaagtgctgggatcacaggcatgagccaatgtgcccagctaatttttgtacttttggtggagttgggggtttcgccatgtttgccaggccggtctcgaactcctggtctcgagacctgcccgccttcgcctctcaaagtgctgggattacagatgtgagccactgcgcccggcctggggatttctttttttaaatgggactctgtaaaatgccatatggacagcacaagtggggtctgccctgggtagagactggcctgaacccagggtcagggaaacatcaaaatccacaggttattccgtgcagagtagggggctcacttggggccgattctgcccctgggggcatttggcaacttttggggacatttgtggttgtcacgacggggaatggggtgctactggcatccagtgggcagagactgaggatactggtcaacactacagtacacacggccgggtgtggtggctcacgcttgtaatcccagcactctgggaggctgagacaggcagatcacgaggtcaggagatcgagaccatcctggctaacacagtgaaaccccgtctctactaaaaatacggaaaattggctgggcgtggtggtgggcgcctgtggtcccagctactcgggagggtgaggcaggagaatggcgtgaacccgggaggcagagcttgcggtgagccgagatcgcgtcactgcgctccagcctgggcgacagagtgagacttcatctcaaaaacaaacaaacaaacaaacaaaaacactacagtacacaggatggcccccaccacagggaattatccagccctaagtgtcagcagtgtcacagtccagaagccctggtgtcaggccctgtgtgtgccgggagcatgcaggtgcagaggggtgggtggaggctactggctacatgagatgcaaacctggatcctgtagtacatgactgctctgggcagctggtggcgtcctcccgggtttacagagtgggagacaggcccggagagcgaatgtcatagagcgctagagtggagaggctgccatctgacccaggttggactaaccccgcagcctgtgtgtttttgccgtgtcacggagttctgggagttggccggctggtcagggtgaggcagggcggttcaggctgctggaagcctgtgtgccgaggaaggggccctcagagcaggtacgacagtgggtggagggcctggagccaggccctgccatgtggagccatggaaggttctagtgggatggcaatgtgagtgacagtgggggtccagggagtggcaggaactggccttgctagaatccatgtatttgtgcacagtggattgttgcagtaactcatgagaaagggcctgttgcctgcccccatggcacagatgagaaattgaggcacaggaggtcacatggctgacggtgggaggaggagctgggacttgaacctgtgtctgactccaaggcccatgcggaggaccttgttgtacgctgagcctcagttcatgttcatctgttgagaagcatagaggttgtccctggtttttctcaacctaaacattctttgtgtttgtcccagtgcatgtactgggggagtggggacctctccaaggtgcctgcctgggaatggccccacctgtgtgtccctgagccccctccagtagggaggagggcgagcagctggaggtgtgccactcacggaggaagactcggggcatttaggaggtgatggtgacagggattattgggagggcgggtgggggagtcccaggctgcagcgtgggaaccagaatcacaggggaggggtggggggtaggagagtcctgcttcaccttggagctcatgggatagaacacacccccactttatttctggttggggtatgtctctgacctccaacaggtcctgcgtggcccctgggtggaggtgggtgccctgttcttctgggtgtggctgtggtgccagcagctggatgggggtccaggtgtgtaaataaggaagtgccgcgtgcctcgagggccagggatgcccgagagccaatgtttattatttgccaactggaaacgaagcatggccggggcctcctccttggggttcttgcacggagggattcagaagcacttggcaccggggggagcagcctcatcggtgtccagccagggccacacagtcagcctcagcccccacctcgcttccttctgggcgagcttagacctgggaggcctctttttttttggagtgccgtggtgcgatctcagctcagcaacctctgcctctcgtgttcaagcgattgtcctgcctcagcctcctgaatagctgggattacaagcgtgcaccgccatacctggctaatttttgcatttttggtagagatggggtttcaccatgttggccaggctggtctccaacttctgacctcaagtaattctccctccttggcctcccaaaatgctgggattacaggcatgagccaatgctcttggcccaacctgggaggccctgctgtctttggtgcatggtgcagtaggggtcacagtggtctctgcctcattggatcatggtgagacgtgaatgtgaaggcatctggtgtatctggaatggggcctggcatagatactcactgtgtgctcactgctgccaagatgctggaggtgtggctactgtggacacatggtgtacccagttggcactgggcaggcatttggcaggcatccaacaggtgcttgatggggacacagcaggcctgcaagaggcacttcgtgcccacacaaggaaatatttagcagatgttcagtaggtgcccagtagatgctcagcaggcacacagtgtgtactcagctggtgttcaacaggctaatggtatgtactcagctggtgctcagcaggcttacagtgtgtgttctgcaggtgctcagcaggtgcacggtgtgttctgcagtgtgtactcagcaggtgctcggcaggcacacggtaggtgctctgcaggtgcacagtttgtgttctgcaggcgctcagctggcgcagcatgtactcagcaggcgctcagcaggcactcagcaggcacacagtgtatactcagcaagtgcttagtaggtgcacagtgtgtactcagcaggcactcagcaggcacagtgtgtactcagcaagtgcttagtaggtgcacagtgtgtactcagcaggcgctcagcaggcacagtgtgtactcagcaagtgcttagcaggtgcacagtgtgtactcagcaggtgcttagcaggcacacagtttgtactcagcaggcgctcagcaggcacacacaacagtgtgtactcagcaagtgcttagcaggtgcacagtgtgtactcagcaggcactcagcaggcacagtgtgtactcagcaggcgctcagcaggcgctcagcaggcacagtgtgtactcagcaggcactcagcaggtgcacagtgtgtactcagcaggcgcacagtgtatactcaccgggcgctcagcaggcgcagtgtgtgctcagcaggtgctcagcagatgcgcagtgtgtactcatcaggttctcagcacatgcacagtgtgtactaagcaggtgctcagcaagtgcagtgtgtacttagcaggcacttagcaggcgcacagtgtgtattccacaggtgcacaatgtgtatacaggtgctcagcaggcgtacagtgttcagcaggcacacggtgtgtattcagcaggtgcacagtgtgtatttggttgctgagcaagtgcacactgtgtactcagtaggcgcagtgtgtgctctgcgggcactcagcaggtgcacagtgtgtatttagcaggcgctcagcaggtgcataatgtgtatttagcaggtactcagcaggcgtaccgtgtgtgctctgcaggcgcttagcaggtgcacagtgtgtatttagcaggcactcagctgacacacagtgtgtatttagcaggcgctcagcaggcacagtgtgaactcagcaggtgctcagcaggcatcagcaggctctggaatctgacctccctgtgggcaggcctgtctccagttcattctggaatctcatagaagcaggtgctctctaagagggccagtaccatgtcacatggtccaatgtccccacttcagtcctgggaggggtgtgcggggtcttctcaatacctccatctgggaacatgtaccggctgttgaggggccctgaagtgagaagagtagtttgtggtcttcctggagctcacatttttctaagcaaatcctgagcctgtatacttgtacggaacacagtgtgttccagggtcaaatcctcggggtaggatggccctggggctgcatgatggtgcccacccagccctctgagtgcctgaacaagaagcactggggtggcccggtgagttctccctgcagcagtgagggtttggataggaaagtccattcctcgagtcagttggtatttcctgagcatctcctgtgagctggccccggagacaccttggagagcaggtcagctggagaccctgccctagggagtgacaggaagccacacctgtgccagctggccctgcccctgaggttgcggctctgagccaaagcgaagagcctggcctcgcctggctctgggggtgatgcctcgtgggccagggtgaggggttgagatctggtcctgggatggggagggttttgagcagggcagtgatgtgggatttatgctttgcaaggatcccattggctgccatgtggggacaggcctgggaggaacgagtagggagcagcaggaggcctaggaggggccagggcaggtgtcccccggagatagtgggtgctggggctctgtgatgacctggggcttggcaaaggcgggcttgtgacagactgagcctcatctcggcagctctcacacccatggatcctgagcctgattccccaggagggttggcgacgggagggttatgttaagtggctgcgtcttccatctcagggagccccacactggggaacgtcaccactatagcggctgagaggctttgggtcctcatttactacataaaattcccccttctctgtacttgggtcctgacgcctccgctggtcccaggagtttcactccgtggggtggggttgaagggtgcggtgaggcccagaggggctgagtctgcttggaagggtgggccttctcccactgcgggtgctaataccctgtgcccatatcctagccaccctgtcccttatccacataccccactctggtatttcaacagcccagagaccaccacggtgcttgggggctctcggcaagggggcgaagcctccctgagaacttctgcaggccgcccttctcttccctttcctgccggggctcttgctgcagagaagctctctgccacacttttttttttttaaataaaaaaaatgaaaataaagaaatcatttatgtttcaaaactttgattaaaattgaaaacagaaacaccacagcacttcccgtttcctctgcatctggcaccactcacctgggtgcagagggtgggtgggtgcatgccagctggtcattcgcccggaaatctctgggaggaagtatcagcacagcctagcagggcgcctgggactggctctgtgggctggccgtccctctggctggggacacggggaggccgagcgtgtccgcaaagacacgcgagctgtccacctttctgggctgcaggggtctgcagaacctcggaacctcggaggggctctctgtctgcttcagcgtctctttctcaagtgactgaaagcagaggctccctgctgcgttacaccattgagtcctttcgcatctgtgcgcatcccgcttccatcgctgcggggatcccttcggtcctcccaggcaggcgagattggtggctgtaattaggacaggagtggctcattatatcatcacagaataaatgcacagaccctggggatgatttatggtcccaacagcctatctttgcgcccaggcggcctcggcctctgttcggcaaggagcccgctaatcccttcactgccggctcagccggggcagaaggaggagcctgaaggtccaccatggggtggaggctgcctgctcgcgggcccgcccccagagcccggggctcatcacgctgctctatgcgcctctgttggctcctgccaaacagtccctcccttctgtgcctcagtttcctggctgtaaaaagggggtgctcacagagcccccttgaggagtcgtcacatggattagatgatgcatccacgcaaagtgtctggccccgtgcccggcccgtggtgggtgcacaccttgaaagatgcctgcttggccgaggccagctgttgagctgctacttggggcaacagtgagagcaggatcgcaccttgttcacctctgtgccttggcccagaatatgacagctgccactgtgtggcttatgggtcatctgtttagtttcacctgagggagtattcattgctgttaactgtttcttatgagataggatttttgttttttgttttttgagacagaatctcactctgtcacccaggctggagtgcaatggcgccatctcagctcactgcaacgtccacctcctgggttcaagcgattctcctacctcagcctcctgagtagctgggattacaggcgtgtgtcaccaggcccagctaatgttttttattttttttgtatttttagtagagacggggtttcaccatgttggtcgggcaggtctccaactcctgatctcaaatgatccgcccaccttggcctcccaaagtgctgggattataggcatgagccaccgcgcccaccgttttgttttttttttttttttttgagacggagtttcactcttgttgcccaggctggaatacagtggtgcaatctcggctcaccgcaacctcctcctcccgggttcaagcaattctcctgtctcagcctcccgagtagctgggattataggcgtgtaccaccacacccggctaattttgtattgttaatagagatggggtttctccatgttggtcaggctggtcttgaactcccgacctcaggtgatttgcccgcctcagcctcccaaagtgctggcattacaggcgtgagccactgtgcccagcatttttttttttttttgagacaaggtctggctctgttgcccaggctggactgcagtggtgtgatcttggctcactgtagcctcaatttcctgggctcaggcagtcctcctgcctcagccgcctgagtagctgagaccataggtgtgtaccaccacagctggctaatttttagtatatattttttgtagagacaggagtctccctgtgttgcctacgctggtctcaaactcctgggctcaagtgatcctcctcctgcctgggcctcccaaagtgctggcttgagccccatacctggcttcttaggggatagtctttttttttttttttttgagatggattttcgctcttgttgctcaggctggagtgcaatggcacaatcttgcctcaccgcaacctccacctcccgggttcaagcgattctcctgccctcagcctcccgagtagctgggatttcaggtatgcgccaccacacccggctaattttgtatttttagtagaggcagggtttctccatgttggtcaggctggtctcgaattcccaacctcaggtgatccacctgcctcggccccccaaagtgctgggattacacaggagatagtctcttagactttgtgaaaagttttggagatagtgcagggaatacccataaccccccacctgtttcccacattgtgaacatcacacgtgacctggttgcgacggccgggctgggacctccagttgtcacagttcttttttttttgagatggagtctcgctctcgctctgttgcctcaatttcctgggctcaggcagtcctcctgcctcagcctcctgaatagctgagactcggctcactgtaagctccacctcctgggttcacgccattctcctgcctcagcctcccgagtagctgggactacaggcgcctgccaccacgcccggctaatttttttgtgtgtatttttagtagagatggggtttcaccttgttagccaggacggtctcggtcaggatagagacggggtttcactgtgttagccaggatggtctcaatctcctgacctcgtgatctgcccaccttggcctcccaaagtgctgggattacaggcgtgagccaccgctcctggcccagttgtcacaattctattaactagactccagactgtgtttggatttccccggattgctcctttaagcaccttctctggacagggttgtgtgttgcatttatttacttacgtatttatttatgcatttatttatttatttatttatgatagagtcttgttctgtcgcctaggctggagtgcagtggcacgatctcagctcactgcaagcaacctccacctcccaggttcaagcgattctggtgtcttagcctcccaagtagctgagattataggcatgcaccaccatgcccggctaatttttgcgtttttagtagagatggtgtttcgctgtgttgaccaggctggtcttgaactgctgacctcagatgattcgcttgccttggcctcccaaagtgctaggattataggtttgagccaccgtgcctggctaatttttgcatttttagtagagatggggtttcactatgttggccaggctggtctcgaactcctgaccccaagttatctgcctgccttggcctcccaaaatgctgggattgcaggcgagagccactgcgcctggcaacgtgttgcatttagtcaaagcatctcctttgattcctccaatctgtgatggttcctcaatgtctcctcatcatccgtgaccttcactctcttgaggagagctggtcaggtgttttgtggaatgtccttattgtggtcttgtggaggttttctggcaattggactgaggttgtgggattttggtggggatcccacagaagtgaagtgctcgttttctttttatattttttctttttttatatttaaaatagggatctgcctgtgttgcccaggttggagtgcagtgctcactgcagccaggaattcctgggctcaagcaatctttccacctcagcctttcaagtagctgggactacaccatcatgcctggctttgttttaaaattcttttgtagagacgggggtcttgccatgttgcccaggctcaagtgatccaccctccttggtctcccaaagtgctaggattacaggcgtgagtcaccatgcccagcctttttcttttttttaaagttagtaaaatacacataacatgtggccagatgcggtagctcttgtctgtaagcccagcactttgggagactgaagcaggtggatcacctgaggtgaggagttcgagaccagtctagtcaacatgttgaaaccccgtctctattaaaaatacaaaaattagctgggtgtggtggcaggcgcctgtaatcccagctactcgggatgctgaggcaggagaatcgcttgaaccctggaggcagaggttgcagtgagccatgatcgcaccactgcactgcagcctgggcaacagaacaagaccctgtctcaaaaacaaaccaaaaacaaaacaaatacacataacgtgtaagttactgtcttaaccttaagtgtgcagttcagtggcatttagtaagtatcctcacattgttttgcaatcatcaccaccatctgtgttcagagcttttgcatcttcccgcacagaaactctgtccccattaaacactcacccacccaccccctaccccccaatccccaacccccaccctcctactaccctccattccctcccagcccctggcaaccaccatcctattttccacctctatgagtttgacgactccagggacctcatgtaaggagaatcatccaggatttatcattttgtgtctggcttatttcactgagcataatgtcctcaaggttcgtccacgttgtaacgtgtcagaacgtccttcccctctaaggctgttattccactgtatggatgggacacattttgtttatccgttcatctgttgatggacatttggctggtttcaccatttggctattgtgcgtagtgctgctgtgaacattggtgtacatctctttgagtccctactcataatttttttgggtatattcccagacatgggattgctggatcatgtgtaattgtatgtttaattttttttgagacagagttttgctctaccacccatgctggagtgcagtggcgtgatctcggctcaccacatcctctgcctcctgggttcaagcggttctgcctcagcctcccgagtagctggaattacaggcgcatgccaccacacctggctaatctttgtgtttttaatggagatgggggtttcaccatgttcgccaggctggtctcgaactcctgacctcagatgatccacctgccttggcctcccaaagtgctgggattacaggcgtgaaccaccacgcccagccagcatgtttaattttttgaggaactgccacactgttctctgtagtggctataccattttatgttcctaccaacagtgtataaggatttcagtttctccatatcctcaataacacttgttattttctgattttttgataatagccatcctaatgtctactaatatttactaatcctaatattttttttttgcaaaaaatgatattttgatagggattgtggttttggtttgcatttccctaatgattagtgatgttgagcatcttttcatgtgcttcttggccatttgtctgtctttggagaaatgtttattcaagtcctgtgcccttttccttttcctctctctctctctttttttttttttttaatgctttttagtatattcatactttatctattttaaattgggttgtttttctttttgcacttggagatcctgttttcccagagctatttgttgaaaagaccatccttttcccattgagtagtttggcacccttgttgaaaatcacttgaccatatatgtgacagtttatttctgggctttctattctattccattggtctttttttttttttttttttttttttttttttttttttttttagacagagtcttgctctgtctctcaggctggagtgcagtggtgcaatcttggctcactgcaacctcctcctcccgggttcaaagcgattctcctgccttagcctcttgagtagctgggattacaggtgcccatcaccacactcagctaatttttgtatttttagtagagatggggtttcaccatgttggccaggctagtcttgaactcttgacctcagatgatcccccccgccttggcctcccgaagtgttgggattataggcgtgagccaccacatctggccccattggtctttatgtttctctttatgccagtatcacactcttttgattactgtagctttgtagttaagttttgagatcaagaagtgtgagtcttccaattttgttattctttttcaatattgtcttggctatttgaggttttttgagattctgtatggattttagggtggatttttttctatttctgcgaaaaaggatattttgatagggattgtggttttggtttgcatttccctaatgattagtgctgttgagcatcttttcatgtgcttattggccatttgtctttggagaaatgtttattcaagtcctttgcccttgttttttagcgctttttagtacattcacattttgactatttttaaattgggttgtttttctttttgttggtgggttgtaagagttctttatatagtctacatattgatcccttatcatctatatgattcgcaaatattttctctcattccgtgggaatggggccttttcactctgttgattacgtcttttgatgcacaagtgtttttaattttggcagcatccaatttatgtattttttcttttgttgcctgtgcttttggtgtccgatccaagaaattattgccaactccagtgtatgaagcttttcctctgttttcttccaagagttttatagttttagtatatatagttttagcttttatggttttagttatagagttacagttttagttttttacttttatagttttagctttagatctttgatccgtcttgagttaatttttgtatatggtgttagatcagggcacagcttcattcttttgcatatggagatcttgtttttccagagccgttttgttgaaaagactgtcccttccccgttgaatggtttggcacccttgttgaaaatcacttgaccatatatgtgagggtttatttctgggcttttattctattccattggtcttgatgtttgtctttatgtcagtaccacactgttttgattactgtagctttgtagttaagttttgaaataacaaagtgtgagtcctccaattttgttatttttcaagattgtcttgtctatttcagattccttgagatcccatatggattttagggtggatttttttctatttcttcaggaaatggtattttggtagggattgcattgaatctagactgttttgggtagtattgccacctctgaaatattaagttgtggccgggcacagtggttcacgcctgtaatcccaccactttgggaggccaaggcaggaggatcacttgagcccaggagttcaagaccaggcagagcaacgtagtcagatcctgtctctatttaaaacaacaacaacaaaaagaagtcacactctcctcctcccagctatgtgaccctgggcaagcccataattggcccctgcctcagtttccccatctgtaagatgtgccatgaagggggctaactctgtcaatgcatgaacagtcctcaggactgtagcttgcacaggtagtgctccatgaaggcagccatgtctcctgggagggctgcctggaggaggagagctctgcagtgggacattaggggtgaggtccgagttgccggtgcaagaggtgggtagggaagggaaggctctttgggtggaggagaaacagcatatatggggcccagaggcctacaggaggcagggaaggaggaaggagagaggagacccagatctggaaaggcccaagagccaagctggagagcttggacgtgatcccacagccagctatggggtggggaggggtgacccaggatcagctttgagctttaagaaaggctagagaaaaggtggtggggttggagaggagaacagggaagggagttgtgggttctggaggggctcaggaactgcagaggagaggtgaacccagggtgcccgagagaggaacggggccaccccgggtttctggcttctgtatcagcatcaggaagatcatggcactgtctgccagggccaggtgaattgggcacgttggctgggggaatcgggaccatgacgagcctggtgaggggctgctgggctggaggagtctcctggggcatcacagggaatgttctggaagcagggctggggcggcacttgggagttagctgacagtaaggagtgacgtgagaaacacagaggccaagtcctcggggagccaagtttgagaggcagacggagcgtggggaccgaggtcagggctcctgtggggccggcctggcccttcccttcccaccgccgttcgggaccctgtggtatcttccgtgggcactggccctgctcccagctgagcggtgcccagaagcaggaggaccctggtttcctgcccctactcagccaccctgcccacgccgtggcaagcccagagctgtgctcagttcaggcagccgtgtggccaccctggtgactcctccctgccgctccctgctgtcctgtcctccgtggggtgctgtctctaggcccgggaggaaggctgaggggaaggcctcatgggtgcagtgggtaaatgtccacccggtacctcctctgagcccgcatggtgctcggaggtgcagggtcccagggctgtttctggagcagcaggtgccaggcatggcatgggaggggccttgtggagcccagagtcgcaggtgcacctggcagtgggcagagcagctgcagaggcttggtgttggcagggtgcacatgaggaggtggtagccaaggggacagggcctcccagcctggtgcccgcagcctccctcacacagggaccacctttcccctcacctggcccctcatcctctgtcctgatgtcccctcatggtgcctttttatgcccaccttgcccccacacgtaaccctcaggcagtgggagaagggctgcagcaggggggtgtggctcctggtgcaggggacaggccaggtggcaggagccaggacagcttcagagggagaagcctccaggcccaaaatggggcctagacaggaaggagggagcgggcaggttaagaagggcagtatctgcatggggctgagagggagcagagagggcatctgagggtggctgggggctgtgtctgagcaaggccatggatgggagttgggatgagcctctgtacctgcggacacccctgctgaggtcctctgggaagccggcagtgcacctaggactccacctgggggagatgggtcccgtctgccctgggcgggcttcctcatgctgggaccccagcctggaacgcagccaggatcaggagccctaaagttaggacctgagggctccgagggctgaggccggggacagctgcctggcgttccctgccgtggatgggctgctgctcccatgttgcctgccctgccctggcccatcagtcctgcctcctccagcagcggtgactttgccacagggaggacagctcaggtcactcctggttaaatccttccagcggcttctcgtcccacccaggatggggtcccacaaagctcagctctcttgaggctctgagcccagcacccgcccccccacacttctttgcccaccctggcttccttggcgagccactgtcatggtcactctgtgaccccagggcctttgtgctcacggggcctcctgcctggagtgctcttcccagctccagcgtcacctccttggccaccttccccccaccccatttccagcttgttttctgcacagccccactcactcggaagtctcccacttccttcctccatctacccacccagctgcccggcccatgcccatctgagccagcacagcttgtcctgggccagcaaggacttgtggcttcccctgctgtggactccccgttcctcgacgtccctccctggcctcccgtcctactgcctgggggcagtgtctggccagcagatccttcttgaaagggaccatccctctgggtgagctggacatgcagggttttctggggctgctggagggggtgggagccaggagccagtgtgagtcggcggccggccgggctcctggctgtgttgagctgttccctcccatgggggctttgggtcagagggtagcgagggtcacactctcaggcacccttgactgtttattttttacatttattttttatttattatttatttattttttgagacagagtctcactctttcacccaagctggagtgcaatggcttgatctcggctcactgcaacctccgcctcctgggttcaagtgattctcctgcctcagcctccccagtagctgggattacaggcacccgccactgtgcccggctaatttttgtattttagtagagatggggtttgggttttgccatgttgcccaggctggtctcgaactcctgacctcaagcgatccacagccttggcctcccaaagtgctgggattacaggtgtgaaccaccgcgcccggcctcacccttgactgtttaggaagcccatgcccaggcttggccagtcacccctctttcttcaccctgtcccaccccacagtgccccctccccagggctttgtaggcctccagctgatggggagtctgctgtggccagggctgctaacagttaactgctggatgagctgcagtaaatttccttggggttttggctcagggtgagacccgcattcccagctttgcttggccacatgcggcatcctagcactgaaccttcccgtcccaggtggcctgcttctcggggaggggcctgggaggacttcttgtttgggagtcggggagccatccttccctccaggccttgggtcagctcagcccacacagctgctgacccagagtgaggggcagtgggacgcgttggccttggcggccccggggccgctttgaaggggagcatgagggcaccgatcctgcgcctctgtgcctgggccgggcgggagctggggatgcatccatcgcctgccaggaatccgggccctgagttgtcggcacttccagcgtttcaggagaagccaagcaattctgatgtttaagttaacttaaaagaaaaaaaaagtaaaagttggccaccagtttgcatttttaaaaaaatgcttctcagacctcaggaaggccacagctgcggccggccacgctcctgctcctgcctgccaggttacaggctctgacgtgggcctgagggcctctgggctgtagtgggtggggcggccgtgctggtcctggggtgggtgccgggcagttccgcccattcccggctgcgttgggagggggtgtgtgatagccaagaagcttgatgccaagggtcttggatcagcagctgacgtcctcttccttatacacatgtgggaccgtggtggcttcctggttagatggcactagggtggtctactttgggcccctccacccacccccacactgccagaaccttgggtatactttttatttctcctttatacttttttcactgagataaaacacatataacataaaaattagcctttatttaattttttgagacagggtcttgctctgttgcccaggctggagtgcagtagttctatcccagcagcctcaacatccaggctcaagtgatcctatcacctcagcctcccaagtagctgggattacaggcgtgtgccaccatggccagctaatttttaaaatttttttgtggagatgggtctcactatattgcccaggctggtctgaaactccttcctgggctcaagccgtcctcctgcctcagcctcccaaagtgctggaattagaagcatgagccactgtgcctggcccagttagacgtttgtttgtttgtttgtttttgagacaggagctcactccgttgcccaggctggagttcagtggcatgatgttggttcactgtagcctccacctcccgggtttaagtgattctcccacctcagccttcctggtagtgagattacaggcgcccaccaccacacccagctaatttttttgtatttttagtagagatagggtttcaccatgttggccaggctggtctagaactcctgacctcaggtaatccgcctgccgtggcctcccaaagtgctgggattataggcatgagccaccatacccagccctaattagccatgttaaagtgtgcaatttagtggcatttagtaccttctcaatattgtacagtgaacacctctgcctggctccagaacatttcatcctcccaaaaagagaatccccttagccgggtgcagttgcccattcctataatcccaacgctttgggaggccaaggcgggcagatcgctcgaggtcaggagtttgagaccagcctggccaacatggcaaaactctgtctctactaaaaatacaaaaattagctgggcatggtggcatacggctgtaatcccagctacctgggaggctgaggcaggagaatggcttgaacccgggaggtagaggctacagtgagccgagatcgtgccactgcactccaggctgggtgacggagcaagactgtctcaaaaaaaaaaaaaaagaccccaccccctatccccatcagcagttactccccgttcccctccccagcccctggcagccagcagtctgcttcctgtctctatggatttgcctgttctggacatttcagatcaatggaatctcacactatgtggcgttttgtgtctggcctctctcactcagcatcgtgtcttcaggcttcttccacgtcgtagcatggatgagtgcctcattcctttccatggctgaatagcattctgctgtatggatggagcacatctggctgaagcacattctgctgtatggatggagcacattctgttcagccacttgtctgttgatgggcatttggcctgtttccaccttttggctgttatgaacagagctgcatggacatgtgtgttgcagggtttgtgtggacactgtcttcagttctcttggatctatactgaggactggaattgcgggatcctgcagtgactctgggtttaactgtttgagtagtggccgggctgtcttcccggagtagaccagttttctaagctccttttccttgttctctgctgtgccccttctgtgggagctgaggccctgcacccttaggcgtcctcctcgtgcccctcctccctccaatgttactgggcctgttgttggggtctgtagtgtttctgtatggctctgcagaggccaggctcaccgccggttggccttagctcaaggtccaggttcgtgttggctgggattcctgcccaggtccatttggaatattccacttgcgcgtgaagcaaaggcccaagtatatgaagtggcgtgcccaggcacagagcccctttctgtacacccagctgcacgcgcggggaggagctgacatcccaaaaggccacgcagaggtgggagctggaggacacagccctgcagtatctgctggggtgagccctgcaccactggcagcccgctccccagcctggtgggtagggctgttttgggagggcctgcaagtgtggaaacctacactaaaaatagcagccacatgcctcctgtgggcggcccacgctcacctctcctggcaccctagcgtgcccggaagcagcagggtgggagggcacaccaggccccacacaagcccatactgtccttacacgtatgcatgaggctgggtgagccatgcacacccaaggccaccctccacagccctgtatcccatgctagggtttggggtgccccagaaatcaggaatcagaatagctccatttgcaggaagacatcacagcacacatgcagccatgatgcagcttccccagtgggtccaggcgggcgcactccatccacctgctattcggtttgcaacaaaactaacactctttttttttttgagacggagtcttgctctgtcacctaggctggagtacggtggtgtgatcttggctcactgcaacctccgcctcctgggttcaagcaattctcctgcctcagcctcctgagtagctgggattacaggtgtgcaccaccacgcccagctaatttttgtatttttagtagagagcgggtttcaccatgttggccaggctggtctcgaactcctgacctcgtgatccgcctgctttggcctcccaaagtgctgggattacaggtgtgagccaccacactcggcctaaaactaatgctcattaaacagacaagggcagcttcccgtccactggtcagatgtggctactggccagcttgtgctgtgatccccagaaaggtctctccagagcattctcatttcagcatggcaggttagggattgaggtgtcgttctcacccccaaatgttgatgacccccggggaacctccaaccctgtggccacatcctgctgtctgcaccctgaatatttgggcctatatgctcccttgccctccctcagccctttggagggcctctcctgcccccactgggctctggggcctgcagttcccagcctgggcttcgggaaggatttccgtgcctgttcagggacctttcaagcacagtttttattattgtcctggggctgccactacaaatgaccacaaaatctggtggtttaagaaacagaaatgtatactctcccagctctggaggccagaagtccaagatcaaggtgtgggcaaggttgactatctgtagaagcctctaggggcggatccctcctgcctctgggggctcccggagctccttggcttgtagccgcatcactccagtctctgcctgtcttcacatggcctgtgtgtctgcatctctttccccttctcctctcttttttttcatttgagacagagactcgctttgccacccaggctggagtgcagtggtgcgatctcggctcactgcaacctccacctcccaggttcaagcaattctcctgccttagtctcccaagtagctgggattacaggtgcacgacaccacgcctggctaataccccttctcttctcttctaaaggcccttgccattggattagggcccaccctactccaacatgactttaactcaattacagctgcaaataccttatttccaagtaagttcccattccaggtgccaggggtcaggacttggacatacttttctgggagtacgtcccacaacagaaagtaagtactgtggtgcaggccccatgcccagcagggagctgcagcctcccctcagccacctgtggccccggggacgggcctgtcctcccctcttcccctgcttctcagtgtgtggacatcatgatgcttttgctttcgtcatttgtgtgattgcatcttggaaccaagtgctgtttgcacgtgcaggtgggctcccaggcagggggtctctctgagttggcctgtttggaggtttgtcccagccaaggggcccacctggctgaacccaccctgctcagggctgcatcctgtttccctgttgactttgctgcagcccacgctccttcctgccactgcttgtggttggctgctgtttggagctgtccccggcattcctgcacccgaagcctgggacaggtgtacgcttatgtgctggcagcggttggcggggggggtgtcgccaaagagcggggatgctgagaatggtccccttgctgggctgcaggtggggagggatgcctccgggattcccagagtcactggtggcatgtgccccccgctgccctgcccagtgccccgccctggggaccctgtagtgagtgcagcagccacagcccacccttgttgggggctgtggtcttagggtggggacatcagcctgagggtcattattggaggtggggccagaatgtggctcccgaatgactctttttttttttttgagacgcaatcttgctctgtcacccaggctggagtgcagtggcacgatctcagctcactgcagtctccacctcccaggttcaagcagttctctgcctcagcctcccaagtagctgggattacaggcgtctgccaccacacccagctaatttttgtatttttagtagagatggggtttcaccatgttggccaggctggtctcaaactcctgacctcatgatccacccaccttggcctcccaaagtgctgggattacaggtgtgagcaactgtgcctggccggctcctgcatgactcttagcccaggtgcagcccagcaagcattagcgtgtggagagcccagcgggcattagtgtgtggagagggcatggctagtataggggctagcgagtagagcatgctgtgtcgtctttcctgtagagctggagtgacctgctcaggtgggaagtttggagagactccagctgagtggtttgggcgctgcagggttaacttgagaccccagtaggaggcttctgtatttgtccaggcaagagaagatgtggcttgggccagaatgaggacagaagaggcgagagggcagaagaggtgctgggacatgggggagccaggtggggcatggggggttcctaaggaagggacaggtttgggcagttgtgaatgtgctcgtgtgtgtgcaagtgagtgggagctggcgtgcaggcaggacaggagtgcaggcaggacaggagtgtgagcatgtgtgtgtgcgtgtgagcatatgtgcatgcacgtgcatgaatgtgtttatgtgactatgtgcattgctgtgagtgtgcacacatgtggctgggtgcatgtgtgtgaacacgtgtgatgtctgtacagcctccctggtgggtgactggcgctgggctggagacatgagtttggggagctttgagtgaggggtgatggtggcactcccagggtggggctgagagggggctgctgggcttgggagtggagggcccaggggaagtctttcccctagcaccctctcccagggtcttcaggctgtgtgggagccaggactgggtctgtctccttgtggcctctgtccttggtgcagtaatgaccactgggtagtggcccttggggtcaagggcatccctggagcccttgccatagatgctgagctggagcagggctgccaccccatactgttcaggggccagtccctcccctctggagctgatcaccccaaacactgtcccctcagaagggtcgtagtgctcactcacaggagcctgtgtttctgcctgtgtgtggggcactggggcccagagaggcagacacagatgcgtgcagccaccagcttggatgcaggacccctgggctcaaacactgccttccagtctcagcctacagtgagtatgggcggggctggaggatgcagctcagagaggagggtgcagggttccggggtgggccaaatgccgggtgggagcagagcagggccgcagggacatgggagggcctctcgcaggacggtttctcatgccagccctggtcaaggcagcagtggtttccagacacgggggtgcgtgtgtgaggcaggaacagtacaagcagagggcccctggggagaaggcctttgacagcaggaagaggacctggcagtagggacaggagtgagggagaagaaaaagacagcagggcctgggcagccccgtcacggggctggctttgaatcttacttatctattgttgaggtgaacaccacataacataagattcaccatctgaaagtgaacagttccatggcgtttggcgcattcacagtattgtgcaggcatcacagctatctagttccagaacattctcatcatccaaaggagaccttgtccccattagcagtccctcccctcctctcctccccagcccctggcagttactaatctgcttcctgtctctgtggatttgcctgttctgagcatttcagatcgatggaatctcacaccctgtggccttctgtacctggcttctctcactcagcatcacatgttcagtttcatccacattgtagcatgggtcagtgcttccttccttttttgttgttcctcttgagacagggtctcactctgtcacccaggctggagtgcagtggtacgatcacagctcactgcagcctccacctcttgggctctgtccaacctcccacctctgcctctcgaatagctgaaattattggtgtgcaccaccatgcatgcctggctaattttttttttttttttttagaaacagggtttcaccatattggccaggctgctctcaaactcctggcctcaagggatcttccctcctccgcctcccaaagtgctgggattacaagtgtgagccaccgtgcccagccttcattccttttcatggctgaatcttattccactgtatggacagaccagtcttattcattcatcccttggcacacacgtgggttttcccaccttttggctgttgtccattgtgctggtacacacactcatgtatgattgtcttcatttcgtgggggcatccgtccaggagtgggattgcttggtcataacagcagctcagcatgtcacttgttgaggaaccgccatacagattgggggtttattttaaataggatggaagcctactggtgtgtttaaaacgggagcataacacgatttgaactgaatgaataaagagaagaaaatgaaggagtctcggcagccacttgcagagggagcagggaggcctgggaggaggtcacgtgggtgtctgggtgcgagatgacacgggctagtaccagggagggggctgacgatgggccctggaagtcgagctgctgggaagtgatcatgggagtgatgaggcaggcagaggaaagggacacctccagcctctgtccctgcttcttctaccctggcgggcgcagcctccaactagtgacccctcctctgggcttggtccttccctgcatcgtgtgtgtctgctgggcactccaaatgtggtgcctggccccgctagcccagaatgcggcctgaagatggtgagacaggcaagggctaaccccaccgggtccccagggcctgcagcaggtgccacctggggcctggctaggagttcaggggcctgggtgaagcctttgggacagggctgtgagggcactcaaggggtaccaggtgggccccggcaggcccaggatctggccttccaaatcacaaaatgacttttggtgttatgtaactccatagtcaagctatgtctaaaaaatggagcataaaagctattttgggcccatggtaatgagggcatctcgcctttgtcttagccgtcctggggggaggcagcgtcgaaagagctgctcagagaggcgggttcagcccagaccccaagcaagccctgtgtcagcaggcagatgccgttttcaaaaatcatttgttccgcctcgaccggaggtggctcctggcagatcgccccgcggtgctcagaatcccagaggcctgcgggcggctgacccggggcgagcagggctgggcctcctctgccgtgtctgggatctgacttccctgaggttaggtccggcacctgtcagaaaccaggcctgacattttcaagatgggcacaggcccgctccgggaaggccccaggcccgtccatgtgggcagcgtcggcgtcgggcttcttgcctgggacccaggggccgctcttggggagggagaccctgtttcaagtggccagcatccccgccagtggtttgcattattcaattggtgataagatttaaaattaaactgcaaaggatctgttcccccagctacaaatagacgtgtgcttgcacattccagaacacaagtgtgcaccaagagatgtgttttgagtcaaggtggagaaaaagtgagtttttttgttttgttttgttttgtttttgagatggagtctcactgtctcccaggctgaagtgtagtgacgcgatctcgtgtcactgcaacctctgcttccctggttcaagcaattctcctgcctcagcctcccgagtagctgggattacagatgtgagccaccacacctgactaacttttgtattttctttctttctttctttttcttttttttgagacagtctcgctctgtcacccaggctggagtgcagtggcatgatctcggctcactgcaagctccgccttccgggttcacgccattctcctgcctcagcctcccgagtaactgggactacagtcgcctgccaccacgcccggctaatttttagtgttttttttttttttttttttttagcagagatggggtttcaccatgttagtcaggatggtcttgatctcctgaccttgtgatccgcccgcctcggcctcccagagtgctgggataacaggcgtgagccaccacgcccggcctaactttggtactttcagtagagacggggtttcatcatgttggccaggctgatctcgaactcctgacctcaagagatccacccaccttgacctcccaaagtactgggattgcaggtgtgagctgctgcacccggctgagttttggaattccctctctttctctctgctcatgtacactatgtgcacgcatgcatggggccctctctgcccgagtacactgcctgcacacatgcgtggggccttagtccttcctttcctgttggtggctgtaacaaatgaccacaaactgggtatcttaaaacaatagaaatgtattcagtgcaggtgtcggcagggctggtgcctgcaggaggctctaggggaggatccttcctgcctcctccagcttcagtggctctaggcgctctttgcatcactccagtctctgccttcattgtcatgtggacacctcctctcactgtgtctcttctcatcttctgaggatgctagtcattggatttaaggcataccctactccagttcaacctctgttttttttttttttttgagacggagtctcgctctgtcgtccaggctggagggcagtggcgcgatctcggctcactgcaagctccgcctcctgggttcacgccattctcctgcctcagcctcccgagtagctgggacttcaggcgcccgccaccatgcccggctaattttttgtattttcggtagagacggggtttcacagtgttagccaggatggtctcgatttcctgaccttgtgatccacccaccttggcctcccaaagtgctgggattacaggcatgagccaccacacccggcctttttttttttttttttttttaaacaaggtcttgctctgtcgcccaggctggagtgcagaggcacaatcatagctcacttcaacctctgcctcctggggtcaagcgatcctcccacctcagcctcctgagtagctggaactacaggcgtgatccaccatgcccagctaatttttgtatttttagtagagacggggtcttgctatgttgcccaggctggtttcaaactcctgagctcaagcaatccacctgcctcagtctcccaaagtgttgggattataggcgtgagccatgcacctggcctcgacctgcaaagactctctccaaatacagtcacattcatagatggcggggttaggacatggctatgtgtttccaggggacacaggcaacccacagcagacattctgccaagtccatcatcactggcccttactgaggtcccccagcctcctctgggtctgcccaggaggtgctgtgacgtacttcaccccatgatccagcacatgggagtacctaggtcaccgtgcagccggggtctcagcagaggccggagtctgccctgagtcaccagaggctgtgggttttggggatatgcaccagagacccccacacctatgcatccgctgactaagttccagatgagattcatcccagccttgctgccatcctgccatggggagcttgcagccctgaatgggagacgagaaaacatgccaagcagttatcaacttgtctggggccccttggctggggagaggagacctggggtgtggacgcaggccacaggcatgccaggtgcctcccagctggcttcagagatgctgggggagtggattggagagtatcccccagacatatgcgcccatgtcctaagtcctggaacgtgtgactctggccttatgtggaaaaaaggtctttgggggtgtgatgaagtgaaagaccttgagatgagatcgtcttggatttaggattggccccgaatcccatgactggtgtccttatttaaagaggagaagacacaggcacacagcgagaaggccacgtgatgaaggaggcagagaccagagtgatgcggccacaagccaaggaggccaaggactgctgacggccaccagtttttgaatggacatgatgttcacataacatgaaattaagcattttagagcatgccgtggtggcgtgtagcacactcccagtgctgtgcaaccttcccttctgtctgcgcccagaacatttccatctccccagagggagacctcaccccgcaggtagtcactccccatttccactcccagccccaggcaaccactaatctgtctctgtggctttgcctattctggatatttcatatcaatgaaaatctgacaccatgtggccttttatgtctggcttctgtcactcagcatcgtgttttcgaggtttgtccatgctgtagcatggatcagtgctacagtcttttttttttgagacagggtcttgctctcttgcccaggctggagtgcagaggtgcaatctcggctcactacatcctctgcctcctgggttcaagcgattcttctgcctcagcctcccaagtacctgggattacaggcatggggcaccactcctggctaatttttgtatttttggtagagatggggtttcaccatgttggccaggctggtctcaaactcctgacctcaagtgatccacctgccacagcctcccaaagtgctgggattacaggcctgagccactgtaattgcccggcctacaatcatattttgttgtacggatggaccacattttgtttatccatttatttggtgggttttgtctttcggatgttgttaaccgtccacctaccgtttgtaagtttgttgacatcttatctccaatctccccatggggagagacggagacctgtctcttcccatctgccttagcatccttgcttctgaagacagctctcaggaagtagcagggcgtgaggaagggatgaagggtgggtgtctgtgtcaccacagcccagaggtgcggagccacgtggtgtctccatgctgtggcttaaagtgttggaagtttgtggccaaggccagttcaccggggaccccaggtccagtatgggtttcctaacggtgggcttgcgtcacattagataaaagacctgagagagaactctggagggcaagggggcatctggttggtatttctgcctgattgccatttgtctggggcctggagagggagccttagctatgtgtttcgatgtggtcagatggcctgtgggcaacagggcagttgccctgcagggacactggtctcagatggagtgagacagcccctgcgtcgacccaccttgctgcctgtgccagctccacagcagcctcgtcagtgtggggcacattgcacacgccaccgtcatctcagttgtccccgtgcgcttggagcctccgggagggaggatgcacgttggcgtgttaatggcgatggcattccaccgtcaccccaggcagaagcagacactgtatgctgcacttatgagacatgtgaaacctccctgcacagaacagagcatcccacatatgtggtcatgggagttgagagagcgacaccgtgagcccaggcttgttccctgggctccaggcgggaaccggcggggcggacaggctcctcggcagcatcgacacggctccctcgtcccctctgcagatggtgaggccccaggagggagcagtgacagctgatcagtctgtggggtggggtgtgtgggtgcgtggggtgttgttctctgcactcgctaggagtcaatttcattttcatcttagaggtgatgggttgttgctgtgtgtggggggattccatgatgagctggctctaggatcaagggacctggggtgttcaggttctcagccctgccctggaaggggagacagcagcacctattgggactggggggccatgtgtgagtttctggtggctgctgtaatatattaaagtactacacctgggctgcttagaacaagaatgtcttctctcatggttctagagcctggaagtctaaaatccaggtgtcggcagggccgagcttcctctggaggctctggggaggaatctttcctgcctcttccagctttcagtggctccagccgttccttggcttgtggctgcatcgccccaatcccggccgtccccctctgcatctgtgtctcatcttctgtctcttaaaagggcagcagtcacccgatgtagggtcctcccggctaatctaggatgatttcttcatcccaagatccttcccttaattatgtctgaaaagactgttttttcaaataaggtcatactctcaggttccagggatgaggaggtggatataaccttttggggacaccgtgaattcactccccagtagctgagctgacctgcatcgagcgcttgggatctgcctctcaccctcttggttgccttggcagttccctaaggcctctgaccctgtcaccccctgcccagcttccctcagcacactggccccacccaggagcgctcctgttggtccgtcccttggacccgcctggagctggggggtgtcccctttgtcctgagtacacacccaggagacccctgtatgcttcaccttggggagctcagtatcttttcttcatagcactctaggccagcgtccctgtgcgagacccccttgctccctagtgcccctgcctggcccctcatggcaatgctgagggggaggcctcctgtgacctctgacctctgcaggcctctgcacctccagccccttctctcccccagctcgggcctgaggccagcaccccttaggtggcttgatccatctcagttgtccctccctgtggcctccagggagcccctgtccagctcccagaatccttgctctctgtcatcgcttggtttctgggttcctgcctgtctctatcctggagaggagaaggaggaggacccagaacctaggaggcctcggccaccctcctggagcggaggttggggcagcctggccagccgtccccacacacgggcccctgggttcagcgttggagaaggcatcagtgccagacctgtggctatgcgtgctcacaggggcaccaggctgccggctggacctggcttggccacttgcatccctggggaggcctggccgtccttggcgccagcccctcctccctcttcctgagcctcccacctctctggcctgtgttaggggcttctttctcctcttctgagtctaattctgtctttctcgcgtggctcaggtattccgccaccttcccccaacacagcctgcatggtctccctctcctggcttacagggtccgcctcggccctcccgtgttctggagaattcctctctccccgtgtgtcgcgcttccggggctgccggtcaccctggctgctcctgctgcccagatcccctggggacatcccagggacgggggccacccagcctcagcccaggtctgcctgtgcccatgcagatctgcagtaaagatgttctagaaagtgcttcctcccgactcatgtaccgcgccctcgatcttctctggagttgaggccgggccctggaacaggctccagctccttgttctcccagctggtgatgcaggaacatctttgcgcataaatctgcgttctggatgatttccctcaggagagcttcccagaagtgggattaccaggttagagggcaggaacgttgctcaggcactcggcggacgctgccaaatggctcagccggcgctcccagccacctgcctctcagagccccatgcatttccagcaccgctgacgtgtgccggcctcgcttcacccctcggtccccgggggacagcagaggaggcccaggcccgggaggggagctggctgccccagaggagccctcaggcggccagctatagggatgaggtgagagccatgggcatctgcttccttgggatggttcttagagtgggctggaggtgacctggggtttggtgagtgtatggggttgaacagtgtcccctcaaaagttcatgttcatccagaacctgtgagtgagctcatttggaaatagggattttacagatggacttaagtcatgatgaggtcattatggaatagggtgggccctaaatccagtgactggtgtccttataaagaagacaaaggctgggcgtggtggcccactcctgtaatccctgtactttgggagaccaaggcgggcggatcatgaggtcaggagtttgagaccagcctggccaacatggtgaaaccctgtctttactaaaaatacaaaaattagccaggtgtgatggtgggtgcctgtaatcccagctacttgggaggccgaggcaggagaattgcttgaacccaggaggtggaggttgcagcgagccgagatcgtgccactgcattccagcctaggtaacagagaaagactccgtcttggggaaaaaaaaaaaaaaaaaaaaaaagaaggcaaaacaggccaggcacggtggcctaggcctttaatcctagcactttggaaggccgaggtgggaggatcacttgaggccaggagtccaggtctagcctgggcaacatagccagaccccatctcagcaaaaaattagaaaataattggccaggcttggtggtgtgctcctgtagtcccaactactcaggaggctgcagcaggagaatcacttgagcccaggagttcaaggctgccatgagctatgattgtgctgctgcactccagcctgggtgacagagtgagaccctgtctcaaacaaacaaggcaaaacagaggcacagggacagaaagggaaaaggacaaggtcaggcacggtggttcacgcgtgtaatccgagcactttggtaggccgaggcaggcaggtcacgaggtcaggagatcgagaccatcctggctaacacagtgaaaccctatctctactaaaaatacaaaaaattagttgggtatggtggcacgcatcagtagtcccagctatgtgggaggctgaggcaggagaatcgcttaaacctgggaggtggaggttgcagtgagccgagatcacgccactgcactccagcctgggtgacagagcaagactctgtctcaaaaaaaaaaaaaaaaagaagaagaaagggaaaaggacacaagcagacagaagcaaagaatgaggcgatccgtctacaagccaagaagtgctaaggatggtcagcagccgcaacagctgggagagaggccaccttgcttttattttatttttattttttgagatggagtctcactatgttgcccaggctgaagtgcagtggcacaatcttggctcactgccacctctgcctcccaggttcaggaagttctcctgcctcagcctcctgagtagctgggattacaggcgcccatcaccatgcccagataattttcttttgtatttttagtagagatggggtttcaccatgttggccaggctgatctcgaactcatgacctcaggtgatccacccacctcagcctcccaaagcgctgggattacaggcgtgagccaccgtgcccggcctccaccttactttcagagcctccagagctgtgcgggaaacatctctgttgtgtcagccacctggtttgtgcttatttgttacagcagcctcaggagactgatatcatgcccaagagttggggatggaccaagggggactctggggtcaggacaagtgacccctcccctggtgtcctggccctcccggtgaggttgcacagaggttgggagaatgtcccgtcccggcccatctctgcctctccacccccttatgttactaggtgaagaattgtacattagcctcatttgaaactttatttccaggcctcttcagcttcaatcgctgcccaggatgcattgtgggtaagcaaaaccaggacaatgggcttgggcttaaaagtatcagagatcccgatttcattcattcctgacaccaagtcacttgaaaaagcagtcgtaacatcacagagcagctccggggaagttctccgtgccttatcctctttttttaatttttttggagatggagtttccctcttgtggcccaggctggggtgcaatagtgcgatcttggctcagtaacctctgcctcctggtttcaagtgactctcccgcctcagcctcctgagtagctgggattacaggcatgtgccacgacacctaactaattttgtatttttagtagagacggagtttcatcatgttggccaggctggtctagaactcctgacctcaagtgatctgcccaccttgacttcccaaagacctcccaaagttctgggattacaggtgtgagccacctcacctggcctttttttttttttttgagacagagtcttgctctgtcgcccaggctggagtgcagtagcacgatctcagctcactgcatcctctacctcccgagttcaagtgattctcctgcctcagcctcccaagtacctggcattacaggtgcctgccatcatgtctggctaattcttgtatttttagtagagacagggttccaccatgttggccaggctggtctcgaactcctgacctcaggtgatccacctcccttggcctcccaaagtgctgggattacaggcgtgagccaccgcacctgcccgccttgttttctttagaagttggttcaggctggccgggcgcggtggctcacgcctgtaatcccagcactttgggaggccgaggtgggcggatcacgaggtcaggagatcgagaccatcctggctaacgtggtaaaaccctgtctctactaaaaatacaaaaaaattagccgggcgtggcggcgggcacctgtagtcccagctactcagggggctgaggtgggagaatggcgtgaacccgagaggcggagcttgcagtgagctgagatcgcgccactgcactctagcctgggcaacagagcgagactccgtctcaaaaaaaaaaaaagaaaaaaaaaaagaagttggttcaggctgggtgtggtggctcatgtctgtaatcctagcactgtgggaggccgagtcaggaggatcattggagctccggagtttgagaccagcctgggcaacatagggagaccgcgtctctactaaaaataaattggctaagcgtgttggcctgccgctgtagtcccagctactggggaagttgaggtgacaggattgcttgagcctggaaggttgaggctgcagtgagccatgattacaccactgcactccagtctgggtgacacagcaagaccccatctttaaaagaataataataataataataagttggttcagtttcatttgcttggaagccccttcagttcccagccccgcagccctgtggcctcccccagaggtggtgtccacactccttatcctcgttcttggccctgctggagcctgtggcagattcctggggttgcctgtgaaaccaggagctgtgactcctgcctgggcctcagtgattatggtggggtcacgcactgggtgccagggtctgccacaccccacccaggggccactgcccagcagcaagtgcacttagccatgcagctccccacacagatcgaggtgggatggtgctgggtgccagccatcctgtgcttatgtcctgtccaaggccggccgtggcttctgatggcttaccctgggaaggtggcctgcaccttcagctggccctgctggtggcgttggtggggatgggctctcctgagggcctcagcagcccttacgaggtaagggctttttgccgtgtgtagatcccacgaagcacatcaccagctcctcactcagggtccctcctgcctcccctggatctgctggggcatgtcccaggcagggggcgcctggtgaacaccgagcccccctgcttcacacgctacctggtgcagcccctggactttggggtggagtcggggtcacattcacagggccttccgggtaggcctgtcttcaggatgggcccttctcccagtgtactggggcccccctacgccctacagccctgccgtggagtcaccggctgggtgttcgccgctccttgtgctgtcctggtttgggcttcatctgcaccctccccgtccctctgcagtgactaccatgagagctggcctggcctggtctctgctccctgtgtccagcctccactcccacccctgcagttcctgctgcccgacccgctgcctacctcatccttcatcccggacggttcctgtaaccacccctcccaactccctagtctcaggatccctgccccctctgggcccttattgaccctactcttcagccagtggtgtcccccttggtccccctactcctggggaccagcccagaagccaccagtggcccccctggctgtctcctcctggtgtgccccgagtcgtggccttagttgagtcccatgtccagagggagcttggagagggaagggcttgtcccaggccctccacagttccggggctgagtatccttccctccctccctccttccctccttccctccttcccttttttaagagacagtgtctcgctgtcacccaggttggagtgcagtgagtggtacaatcttggctcacagcaccctccacctcctggactcaaacagtactgcctctgcctcccgtgttgctgggactacaggtgtgtgccaatgtgctcagcctgggctaattttcttaggctgccatagcaaagcaccatgaatcaggtggcttaagacaatagaaatgtcttgtctctcatctctgaaggccagaagcctaagatcaaggagtcagcgtggctggttcctcctgaggccatgagggagagccagtctcaggcccctttccagctcctggtggcccagcgatcctcggcaggctcttgacttgtagacgcggcaccccgatctctgcctttattgccgcttggcccactttcctcagtgtctctgtcctcccctctcatgggggcaccagtcattggatgcagggacctccttaattccaggatgatctcatttcaagatcccgcactaattacatctgcagaaactctctcttttcaaataaggtcacgttccgaggttttggtggacatgagtttcaggggagctgtgagtccatctaacacaggacccgattcatcctgggctgcctggccttgaactctgggctgctcctgctaccttgtgctgcctccagctggacagcaggccccccgctagcccccttgcgtccccagcccgtgaaccccaccgagcaggcacgttgcttatcttcgggagactcattccagaaacaccgcccacagcttcctgctcgtcacacctcggctgcctggctgccccggggggtggggggaaggcactgctggtcacctttgtaccacagacacttggccctttagggctagcgcacactggagcccgacccaggaaccccctctcctcacccaccctgcaccccgggggctcctgcagggagagtcctgggctccgtgggcttcacctgggtttggctgcctgtggttgccccctgatgacttgggatgtggggcgattctgggctgcccagtttcagatacacctgtctatggacagttcctgtaattcctgggggtgatgctgggcccccaggggcagggcatgttggcctgcagaaagacacaggcaggcggcttatttgtgagcaggtgccacagactgaattctgtctcccacaaactcacaagttgaagccttcacccccagcgaggctgtatttggaggtggggctgttaggaggtagttaaggttaaatcaagccataaagggggggtcccgatctctaggattggaggccttgtaagaagaagaagagagatctctaagcacacacagctgggagaggccattcgaggactcagaaggttggccccccagggccaggaaaggcgctgtacctggaacctggtctgggtactgctgggccctgatcttggacttccagcctccagaaggaaggcattctgtccagaggaagacatttctgtcatttaagctgcttggtctttggtattttatcatggcagcctgggctgctaagacagaggattattttggatgcagggattgggggtctggcagggcttcctggggaggtagtgcttgaactgagtcccagatgatgaatgggaactgttgtggaaggttccagacaagggcttcgtgggtgcagagcccagcagcaaaaggcagaggagggccttgagtgccaccagtggggagttggggtttgcctctgggggaaggaaaagagagctttaaacctggggatactccagaagcctttcagaataactacaggaggccgggtgtggtggctcacacctgtaattccagcactttgggaggccaggcaggaggatcacttgaggccaggagttcaagaccagcctgggcaacataggaagaccccatctctgaaaataaaaaacttagttgagcgtggtggcgggcacctatagtcccaactactcgggaggctgaggcaggaggatcatttgaatccagaagatggaggctgcagtgagctgtgttcactccactgcactccagcctgggcaatagggcaagacctgtctcttaaaaaaaaaaaaaatgatgacaagagacagccctcccggctggggaaagagcctggattgtaactgaggcccctcctgtcttcccttagtgcctcaatttaccagcttgcaaaataagggtacagctgtgtctccctgctcttaggactgctgcaaggccccacacagggtgggcgcttggccagctggcagggctggagtctcttttgtggggagggaggcccctgtgagccagctgtgtgcgctcagcccccgagggacccttcacacgtcccagccgccacctacaagagaaacaaaacgtgctcacggcagaccctctgttcagctgggtctggaaatttggcagcagcaaccatgcctgataaaaggcattccgaggcaggcctggtgtttgtatatgtggttctgtatttacatgagtggagggagcaaggaggcagcaggggagtgtctccagggcccaggagactcagcctggaatccacgtgcccctgatgctctcatcatcattccctatcgcttcccaagctcggcagatgtttactgaggaactctggtggaccagccatgcagcgaggggtcagctcagctcttctcatcaggtcctcagtaaacgtggggacccacggcatggagggactgaggcaaaaacaaagttgacagccagaatgaactcagaatgggccaaagacctaaatgcaagagctagaagtgtaaaactcctgtaagaaaacagaggggctggctgggcgcggtggctcctgcctgtaatcccagcactttgggaggccaaggatcacttgaggtcaagagttcaagaccagcctggccaacatggtgaaaccccatctctactaaaaatacaaaaattcgccgggcatggtggcgcgtgcctgtaatcccagctacttgggaggctgagaatcacttgaccccggcaggtggaggttgcagtgagtcaagatcgcgccactccactgcagcctgggtgacaagagtgagactccgtctcaaaaaaaaaaagtccagaacagataaatccacagagacaggaaacggattagtggctgccaggggctgggggaggggaatggggagtgactgctgatggggatggggtttctttatggagtgattgaaatgttctagaaccagacagaggtgatggttgacagtgtactaaatgcctctgaatcattcactttcaaacaagatcatggtaaattttttatgtggattttattgcagcttttttgaaagtatatttttcatgtaaaagattaaaaaaaaatagaaagaaacaggccacagagagaaaccaatggtgggccgggcacagtggcttacacctgtcatcccagcactttgggggccaaggcaggaggattgcttgaggccagcctggacaacatgggggaccctgtctctacagaaagaaaaaaaaaaaaaaggccatggtggtgcacaccactactcccagctacttaggaggctgagatgggaggattgtttgagcccaggaggctgcagtgagccctgatcgtgccgctgtactccagcctgggccacagacaaagaccctgtcgcaaataaaagaaagaaagaaaacagatgcgggacgtcagtctcaggctgtggccttgctgctccaagctgtgttcccacacacacagtttccagaggtgggcagtggcaacaccctggggagggtccgtcagggctggcagctcctgctacacagcaggtgatcccctcagtcactagcctctcctgttcccctgggacccagtgcctggaggtgggcagcagctcccacattccctgtgtaccctgcggccattacccagccccggcctctgggagaatgaatcggtcaggggatgctgggcatgcatcccttacccctatggcgaggcgtccgggcagaaaatcctcccccacaacacgcacaggtgatggcgacgggcttctgagcaaaatgcgtgagatctggggctctttgctgggcccttggaggagcacaggaggaggcttgagggtcagacatgggaagttctatgtccacaagtcaggggcagaaggctttgctgcagcctccgacatcacttggagctttgggggtacctgtcagagacttggatgccccagggctgggcagaggcctgagggctcttgtccctgtctcccttctcacactggcatcagcccctcctggcattggggatgccatccctgctggtgcatctggttaaaagctggcctggagggtgttcacctcctttgttctgcttgatccagggcagtgacaaggggaccccccggggagcgggggatcctgagcatggcactggatcgaggcgcacgccagctcctgcaggcctcgttttgaagccgaggtctcaactgcagggagcagatggcgtgtcccctgggagtgctggggtgggggcggtgacagggctgtggggccggctctgggcagcatgggcaggtgcggcctcacagtagaggcctggagcccttaggggaagagtcctgctctggctgttgatggtaagtggctccagaagcttccgttccctcgatgaccgtatttcacccctggtggcccatctcagaccctatgagctcccagtcctgggccttggcacctgctgttcctcctcccctgcaaggctccccagtgctgtgtctctgccagtccacggccgcacagtggctcaggctgaagctcccacagtcaccacttgcctggagatctaatgcttgctgcccgctctgggctgtgggctcgtgtgagcagtgcccatctggctggctggctgccatgtccactgaacctagaaccatgcccagtgctgggcagactcttgccttgagtctggcaggggaggtggggacactgccgtggtggggcgggagctgggctggctgagcgggtgggtgcctgagccttggttggttttcagctgttgacccagctgggcttcacgccagcagcaggggttccagccagcgtggacatgggaggatgaaggctcttgccctgtgggggtgtccttcaagtcggcacacatccccgcctgcggctgctgggacgcttggagatccctccaaggcccaggcctcctgccttcattccagggtccctctgccttcatcagccttcccagaactccatcttgggaagccccgagttatggggctgcagggtcaaggggtgcgaatccccggggtcctggtcagctcccaggatccaggatccaggtacatcctgtgcattcgctgggctggagaaagtgttcgctccccaccttcctcttgtagggccatgcctcaggctgaggtgcctgctgcctctgctctcaggcagtctctgtgctttcttgagcctcagtttccccatctggactgtcaggggaggggctgtgcagagggcggccccttggaggaggctcagtgctgggcagcggtgggcccagggggaagagccttctggtacaggcagcacccgtgcaaaggcccggaggtagcgactggtggctccgggaggaagcatgtgagctggagcctatggtcatggagagtggagactagactttgaagcctagaggtggagagggggggaaactgaggcctgactggcacagacagcacttccctccctggcccccccacagggaggccctgggtctgccacggctttgcagggccgagctcagccatcagcccgcctgcttccctcaatctcattagaaggttggccggttgccatggcagttgcttctgggcctgaccaaggctggccggtctgcagagcgagccccaggaagggctggcaggtggaggtgtcgctgtgccctgtgcaggattcctgggagactgagtgctgcccgaacatctctccacatcctggagaagtagccacaggcgcattatactggggccacccggcctccattcccctacctaggggctcctgctccatccagccctgtggacacttcctgggcggggcaggggcgtagacttagcaggagtgtggacgtgggcacagacagaggcagaggtgggcgttctccagggcgagggtcctgtcagcaaggggtgggggtcagcggaggcctgagaagccacctttacgaagggctctatagaggggtcaggtgggggggtaggactttgtgtgagggggtcccggcgcaggctgtatcaggagcgggggtccctgcggtcagcttggtagtgtcagagcttctgggtccacatctgcctcccacgtgcctccactgatgctggcaagctctcatctgagatcgggtggcttcagtaacacttgtcccaggaggggccatgtgacttcagtcatgctggtcatgcaggggttaagtttcaggcatgtggggcctcagttttcccatctggagagtggcatgtactggtacaccctcaaaagccctgtagaggggtgaatcatgtcccacaaaaagatacgtccacactctcactcctggaacctgggaaggtgaccttacagttgactcttgaatcaatggttttgagccacgcatgtctactcatacgtggattctctcccgcctctgtcatgcctgagacagcaagaccaagctgccgccctcctgctgctgctcctcctcctcctcctcctcctcctcccttttcctcctcctcagccagctctacgtgaaggacggtgaggacaaagacctttgggataatccccttccacttcacaaatagcaaacattttctcttccttaatgattttcttagtatcattttcttttctttagctttattgtaagaatacagtatgtaatacgtataacataccaaatctgtcttaattgactcatattatcagtgaggcttccagtcaacagtaggctattagttaagtgttggaggagtcagaagttatactggagtggggcacggtggctcatgcctctaatcccagcactttgggaagctgaggtgggaggactgcttgaagccaggagttggagaccagctggtcaacatagtgagactccatctctacaaaagttaaaaattagccaggcatggtggtttgtgcctgtggccccagatactcaggaggccaaagtgggaggatcacctgatcctgggaagccaaggctgcagtgaggtgtgattgtgccactgccctccagcctgggtgacagagtgagagcctgtctcaaaataaataaatgaataaataaatagaagtaaaaactataaaaagaaaaaaaattatacttggatttttggccgcatgagggtcagctccccaatccccgtgttgtctcagggtcaactgtagttggaaatagggcctccagatgagaccgtcctggattagggtgggcctttctctttaattgtaagagaaaggagagctgagccaggcccagtggctcactcctgtaatcccagcactttgggaggctgaggcaggcggatcacctgaggtcaggggtctgagaccagcctggccaacatggcgaaaccccatctctactaaaaatacaaaaattgtctgagtgtggtggcacgcctgtaattccagctactcaggaggctgaggcaggagaatcgcttgaacccaggaggtagaggttgcagtgagccgagatcgcgccattacactccagcttgggcaacaagagggagactccgtctcaaaacaacaacaacaacaacaacaaagccagaggctggtgcgattgtgacttggggggctgcttcttgagcaggggtgttggggatgcccctctaaggaggggccgtcaggccttgcatgaggggtcagtggggaaaggacaagctgggggcactttggggcttgggcggctggagggagtgaggctggggaggctggaggcaaagcccacccaccctcagcagggccctccaaatcgccagtggggtccactctcacagccaggcagccaggaccagatgcccatctatctggcccacaggccatgagtgaggggcgccctgggagctgcagttttcccgactcctaccggacgccttctccaggcctcagctgtttcacctgtcgccccgcttgttgacagccatggggatggtgtggagatgggacacctgagtcccaggtcagccccgagcctctgtgtagggcaggctggagctgctgtggcatcccaggagctccctccagagctagccgctggctccaagtgagggttacaccttgaggtggcttgtgttgcctgggccagctgaggaagggggtggccaagctgccgcctgaggcctcctgggttttaatcttaagtgcttgtacagcctccagacgggcctgtcacctggcttgtgaagtcagctgtggaggaggtgcagcagcgtccattcattcattcattcaccccctcacatctttgttcacttgtggattccgccggcaggcgctgctgagcagcgggtcctgggctggctgctgggttcacggagctcgtcctcagggtctcagtggtttggggagcacagcatggtggggggcaggggactgtgatgtggcgatgagaaaagctgtgatgttgcctgcagtgcagtgacatctggccgttcttccagctgaggccagaggtctgtgggggcagagcccaagctggcgtcccaccaccctgagaccccagagaaaggaggaccctgctcccaggggttccagccaggctggggaggaaagtcagctcctgcagactcaggagtctccgtgcccaccctctggctagaaaattcactggaaggactccccagaagccgttttgttcatgcttatggtttattgcagcgaaaggacacattaaaattacccaagggaggctgggtgtggtggctcacacctgtaaccccagcattttcggaggctgaggcgggcgaatctcttgaggtcaggggttcaagaccagcctggccaacgtggtgaaactccgtctctactaaaaatacaaaaattagctgggtgtggtgttgcatacctgtaatcccagctactcaggaagctgaggtgagagaatcgcttgaaccctggaagtggaggttgcagtaagccgagatagtgccactgcactccagcctggatgacagagctagactccatcttaaaaaaaaaaaaaatcacccaagggaagaggcagatgggcagggtccaggagaaaccaggccagaacctccagtcagcccctcatgtgaacagtgcgtaattctcccagcatggagcactgccagccgcagaagctcccctggcctgcatgtccagggtctgtactgggggctggtcctgtagacgtggctgaccaccctcatggccaacctgtctctagtccctccagatgtcaagctgatgtgcccaaactcccaccctaaaaccacagtgtgagcagactctgccatagcccaaggcctcaggcacacaatgacactcttatcaggcaggatattctcctgcaggtcacctcccaggagctggggacaaaggtcagacctctcttggggccagcttaacccttttgctgtacaactcctcatgcaaaaccaagaatgagcatggggttccccaaaagaagagcagaggccaggcgcggtgactcattcctgtaatcccaacactttgggaggccgaggcgggtggatcacttgaggtcaggagtttgagaccagcctgagcaacatggtgaaaaactctgtctctactagaaatacaaaaaaaaaaattagccaggcatggtgcctgtagtctcagctagttcggaggctgaggcaggagaatcacttgagcctgggagatggaggttgtagtgagccaagatggcgccactgcactccagcctgggcaacagagcgagactccatctcaaaaaaacaaacaaacaacaacaacaacaaaaaagaaaagcagagtccccactcagtgtccactcctggcccaggggctgtgctccgaagcctgagtgcctccagcaaagtggacaggagctgggaattgtgggcaaggtttggacagagatggggcttgggaaccatgagagttctgtgtgtccccagtcctgtagattgtccccgcatcccaggtttcctgtggcccggggacatagtgtaaacaaagctgcttcagggagttcttgcccctgatgtctggcctcctgggagctggcagctcagcccgtgtagaaagcacatgtggcatgagtacctgctgtgtcacacgtcgtgtgtccctctcacacccgcctgtagcactcactctaggtcggggacacaggtccaggaggggtcacagcctttagggccatatagtcagtgagaggtgaatgtagcacaggtttctgtcatgctacttggacacagaagagggtggagaaagtcacgggaggccacaggcgacctatgcccaggtaggtgtggggtgggagctgtaggacccccaccctacaccccctccctctgccacagcccggagctggcctgtttcatctggtgtgactgctgggagggacactgtggatgttcattgtgtatgtgtctggccagcggccaccaagggctcccagcacagaccctgggcctcacccccaggccctcgagagccacccaataacacacaaggttaatcttaccatcggctccacttcagctcacaggaaacagctgtttacctgggcgaggtgctcagccgggcaggtggccagttcccgggctttacttccgcctccggtgtccagggccccctaggaagctggggcggtggggcagccagctctccacgcactgccaggagctgtttgtaaggaacgagtcggccttgttgtgtacacagtgtccaccctagcaaccgcccctgccgggccagagtggacaaccacccctccttcctgcctgcccagccccacctctcctcacggtggctgcctcccccagttgcatggcaggcatcatggaccagcatccccaagggcctcgggtcgtgccacatgggtcaggggcctctgttactggcaaatcagcatcagccacatgaaggggaggaggccagcttccagccctgttcagagtcagcgtgacccatcagggagctcctggcccctggttctgtgccccgatgccatcagggagtgggaagcagggatgcagctgagatgaaggcgctcagctgggcccagcccccaagaggctgggaaggaccatgaggaaggaacatggggctcaggaccctctagaactcaagctgggtctgggggactgacttggctgccctggctctgtgtgggctgccgtcgggatcacaagtcccacgctttgaaggccatcaccacgcttctgagacagcttcctccgattcaggccagtgggaagccgcctggcctgccaagtcacagcctctggccgtgataagaaatggctcccctgggctggtgaggggcctccttggcaggctgcaggcccgccagtgcctctcttgcccattcactgactgaccgaatcagcagcaaggcagccagctccccaggttcacggtcatgggtttctgcatggtgcattgccccgcctggggagccgtcccggcacctcgggtttctgattctgccatttttggtggagggacacctggtttccttaagcatctgggtcatgaggtcctgcaaacttctgcacttaggctgtcaatcccaccacttgggtctttttgtgcctttggggctggcactctgaggtgagcctgggaggtgacccctcccgcagctgctggcttctctctcgcagctccagctccagaaatcccagtacctgcaactgggccccagccgaggccagtactatggcgggtccctgcccaacgtgaaccagatcgggagtggcaccatggacctgcccttccaggtgagtgccccgccccctggccctgccccattgtggggagcttcccccagcctcccactgggggccagacattgaggacagctggggttatcagacagttggcggagcccacccaaccactgccttctccttgtctgccctgggaaccagaggaagcagagtggccccaccagggtgcccccgcagcccattccccatcagcagaccccgaggcgagccctccatctggcctccagcatttcggcagccgctacacctgttggccggctgtgcggcagcgggaaccgctcggggccactggggcttggctctgtcctgcctcactaatccgcaagcccagcaattctcagaaggaggcccggcggcctgaccccacttgtctgcaaacgtttcttggcagaggcccacacagcgcggctcccgcaggccgcacagccgccgtgcacagccttatcgtaaacaggagataaggcccacagcggccctcttccctgtccctggtctgcgggtggagatggggatggggtggggccgagggagctggcctatgaatcagggccacccccaggacggtgtctgggctctgcatggacaggtccccctgggggggggtcacacctactctgtggctgagaaaaccacctcggacacagccatggccactgacaggccagatggagccggggcccctcccaagtcacccaccagctccaccgccacctgcaccgccgctggacagggcagggatccttgggctggccaccacggtgcgcctcctccggcatacagagtgcgggccatcactgatgctgggcgtgttctttgtcacagcccttcctggccaggttttctcccctcctgcccttctctccctttcctgtttctcctgtcccctcttccctggaggagagtctctctctgggcaccttgcaagctcagcctgagtggggctgaggggcacaggaccctgttgggtgtctgtcgcccgaggcccacagcccggggggaggtcccacgcatcccgcctttggggccaggcaaggcagcagcgtctcaaagtctcggttctttgcattttcagcccagcggatttctgggggaggccctggcagcggctcctgtctctctggtaaatgagcccccaggctgaggccgcggcgtccccggcgccagcctgcaagaccccgacccgtgtgcgggcgctggggatccctgagctccccaagcggccgcccctgcggctcccagggaggtggaggtgtcccgtccgccaaatggaaatggatccactccgcacccccatctcgggaagtgcgtatggtcgcgtcgagaggccctggggactcttggggtccatctggggcagatgccatagccgcgcatccccatctggggtccagcagagcagaatcccagcatgtgccccaaagctgcatggtccgtccctatatacacacacacacaaacacacacacacacacacacatacacacacgtgtgcacgcatctcccaaaccaggccagcaggcaggacgtggcgagcccgggtgtggccagcccccgcttcattctgcctctgacttggctttggctgcctcagtttccctctgggcttcaaggcatctctggaaggagatgaattgcccctaccctgaggagcctgtgcactggacagcacagttcccaccctcatcgtcacaggcccacgtctcccatgcccacagccttttgggggcaagagccacggaaagacccaaaccagcagagttcatgctggatcgaagaaagacttgggggtccccagggctggggacagtagtcagccctgaactctggccgaggctgggacaaagcagcaatcctagccatggacaggcttctggagaggagactcactttagtatcagagtctcattttgcccggctgcccagagaaggcataagggctcaggggccagatggccggactgggggattggctgcatccaaagctggcagagcctgctgatctcaccccagtcagatggcaagtgggcaacacagggtcagggcgggctcctggcagccccgggggcatgaggccgggcatgtagcagggcctggggagggccagcctggtgccagccccaggtgctgggaggaagccccatccagccaagcagtgggccatggctccggaaggcgcctgtacttggctctggtggtgcctggagtgcctggaggaggctgcgggggagggtgtgtgggggccgcgtctcaatcaagagcagccctgggctccacaaggaagcctcccaggaactcgcgcttggccaggtgggccccgaaacagtcctgggctggaagcccctgggctgtctcttggcaggcccctccagggatgacgtaggtgggggtaggaggccgtccaggcccggagagagagggcggaggcctgtctgcacctggtgagactggggaggagggctgcctaggccggctacatccctggcacccggcgggcgctggccccgagcttgtgccgctctgcctggcctgtgcatgccagctgcactgcacgcccctgccaccctggctcccgggaccccagctcacaccccctccctaccccccagtgcttggagagccagggagctggggctgaaggaagaagcccatcccaggctgtggagcgatggccgagggtgctccagagtggggggccctgcgatcagactctggggccagcgctggggccacagctggtaaccattgtttggatttctctctctctgtttccatctcctcctcccccagacccccttccaatcctcgggcctggacaccagccggaccacccggcaccatgggctggtggacagggtgtaccgggagcgtggccggctcggctccccacaccgccggcccctgtcagtggacaaacacggacggcagatatccttttcaccagaggatgagggtgggggccaggccctgtcggtgccggcaggaccccaagtttacccagcaggttctgacagggctgcctgcttccagctctggggacagaatcagggcagcaccatctgggaggcttgatctcagggcagcctgggggacttcctggaggaggctgtgccacaagccctggagcctttggccagacttgggggctcaaggggcacagggaacagctctcaaggcaggagttgaggaaggttatacctgaccacagagggcttagacacctggcagggcagtggggccaggaaggccgtgagcagggagcccacagtcagggctgtgagctgatgaggcctctcctacgcgctgcacggagggcagcccagccaaggcaatggggctaagggggtctgtgtgagacccggacgcatccaagggaggctccatctctgtaagacaggagtaaaattcgcctctgcgactcggtcacgcagagatcagccagagtccccccctcccccccaactcagccgccccttggtgctcagccagccgggccccacaacaccagagtctgagcggcctcaggttgctcccgggatcccccggctctccagaacagagaagcttgttctccggttctcatttccgtgggctgggggagcttgaccagctgggccccagactgagcccttgggccccaggagccaccccgtcagcccaggatggagagtccagaccagggtcagctgaactcagactccacagcgtccccacaggccctactttcacagcccagaaccccctcccttggaaggggtgcagcccgcacgtgtgctcacggagcagagtgctgagtgctaggtggacagggctgtacccctggagagcccctggaacgggggctgcttgtagccaggcaggaaaggccggcaggaaacgccccccgccctactggtcccagctgtttgcaggcctcaggccgaccccagccagccagccggggcttcctgccctgggctgagagtgtgttgttggaggcggggtctcagccagtggcactgcccccttaactcacctcacgccgacagctgcccctatggcaccatgtacctctcaccacccgcggacaccagctggagaaggtcagtggctggacaccccccccccgcccccttcttgttggaaacaaaaccaaactctcatcatggttacatgtggaaaagcaggacacagtcgcttaaacaatgaccaaactaagatgcatccagaagtttctagaaattagccttcaccctgaaacacaggagttccagctttgggaggtcttctaacatttcccttccccccacttatgacaaaaaaaaagacaaaaacaaaagtgggaccaggagtggtggctcaggcctgtaatctcagcactttggggggccgaggcaggcggatcacttgaggtcaggagtttgagaccagcctggccaacatggtgaaaccccgtctctactaaaaatacaaaaatttgccagcatggtggcgcatgcctgtaatccccagctactcaggaggctgaggcgggataattgaacccgggaggcggaggttgcggtgagccaagatcgagccactgcactccagcctgggtgacagagtgagactccatcgcaagaaaaagaaagtgggacgataccgcatattcagcactgtagcttgctctttcctatttaatgctgtattcagagcaggtacccatgttactcaacagccattaaaaatgtgatgataaaattatattaacacatttaggatggaagattaggaaaaatacaggccaggcacagtggctcacgcctgtaatcccagcacttttggagaccaacgcaggcgatcagttgaacccaggagttgaagaccagcctgaacaacatagaaagatcccatctttacaaaaaatgagagaattagccagatgtagtagtgcacgcctgtactcccagctactcgggaggctgaggtgggagaattgcttgagcccaggaggtcaaggctgcagtgagctgtaatcatgccactacagtccagcctgggccacagagcgagaccctgtctccaaggcctaaaataacaataatatagttaatataaaaacatacaataatatagatcatggttgtacaacaatgtgaatgtacttaatgtcacagaactatacactcaaaaacagttaaaactatacatatatacacacatatttacatacatatgtatacaaacgtgtgtgtgtatataattttttttctgagacatggtcacactctgttactgaggctggagtgcaatggcgcgatcacaggtcactgcagcctcgacttcccagactgaatcgtcccacctctgcttccagctgatttttttttttttttttttttttttggagagacaagatcttgccacgttacccaggctggtctcaaactcctgggcccaagtgatccacccatctcggcctcccaaagtgctgggattacaggacatgagccactgtgcctggctgttatatatattttactacaatagaaatatatataacaggcacagtggctcacacctgtaatcccagcactttgggaggccgaggcgggtggatcactagagcttgggaggttgaggatgcagtgagctatgatcatgccactgtacaccagcctggggggcagagtgagaccctgtctcaaaaaaaaaaaaagaaaaaccatatacatacatacacacgcacacacaccacacacatacacacacatgttagtaaacggaagaaaagtaagcaagctgttcaaaatatatatgtatactacaatattaaattctcaccaagcccgtatcataggtcaggccctgttcccaccatcacattcattaacttatataaaatgaatggagctttatggagtgggcagtgtgttcatctccattgtagtccgtgttagacatgaggaaattgagcacagagaggtcaaaacacttgctcagagacacatagctggtggtggctgtacccacattttgcctggcagccaaggaggctttctggggacccactcttgaggcacctgcagccaggagcagattgggtggccttgtgctttctccccatcagttcctagagggaaatgcggtccctggaggtagagggaagagcctctcctgggctagttgaagcaagacctcctgcctcaggttggcttcccaaccacgggggcctctaagtggcttcattccttccggggccttctcctagcccattccacctgtcacactgggtttgtgtgacactgagcatcctagagggcacagtcacctgattgtgtttgtcaccaagaggggacctggtgacagactggaggctcataccccaaggctgggcacctgtggggctccttctttgggaggtttcagcaggagggcactgtcctttccccaaagccaagaagccttgctctgttgcccaggttggtcttgaattcctgggctcaagtgatcctctcacctcagcctcctgtgtcgctgggaccacaggcgtgcgccacctcgcgcggctgctttttgtttttcacgagctttgcagatgaacaccgcagtcactctggtggctctttttagaatgaggtcccgagagctttgctcaggtgcagcagctcacaaaaatgatccacagctgccaccctgtccatccagcgtgtcccagctgggatcaggactatcgcattgtctgccttgggctgaggctcattgtctcttcctccctccccaccaggaccaattctgactccgccctgcaccagagcacaatgacgcccacgcagccagaatcctttagcagtgggtcccaggacgtgcaccagaaaagaggtatggacaggggactcgggtgtctctgctggggtgaggcaagtccagcaggtaacccctgttctccaggaggtcacaagcttgtgggcagatggctcttcaaaggaagactcagaccatgctgagggatcgggggaggggatcggaaactttcagaggtggtgctacttaagttggattttgaagagtgcataggagttttctaggcagagaaaacaaccctgcaggcgcacgttggctcccattcctggattgagggcgtggccatgaagtctgggtgctgcacagatgctggtttcaaatgtagcggcagcaagcccacgcaaaggagcatttgtcagctcatgacagagcaggccaggggtcgacttctagccacaggttcagctccttccactgcttcccactggactgtttcctggctctgctgctgagaactctcctcgcctgcagcccctgggcccgtcctagctatagcgagtgagaaagaggccatctcttcccaactcttggccagagtgtcgcctccagctgagccatgcacacccctgtggcggggacagatctgtacccaggtccttggctccaatttgaagccgggcgtggaggcggcaccctgggaaccttcaaggagggcatatgctgtcttaaaaactggggcggtgccatcagagaagggagcttggaggcttgaggccagccccagggaacctggtgtggcccaaggcactgaagccagggagttgcacgtgcttagggctcacatacctatgcttgtattgctgccgttcaccgagtgggtggttaacacgcaagggagattctgctgataggaggaggaagaggaggaggaggaggactgttggccagaacctcactccggggttccggctcagcgtgcagcagagacgggagggagaagagaatgtctccataatgaaaatgaggcttctggaacacccaggggtgctgaggatagcacagtgcctggggcttccctgctattcctaatgagcaggctgttctgaggctgctgcctgtcctactaggtccccacagacagcacgtccgaggggtgggcaacaggatgtcaccatcccctggaacactgtaacctgggaaaggagctgtgacatgggacccctggtggccttggagtgggggcctggcagggacacatcatctatccccactctcctcggagcgcctgaggtggtgacagggctggggttggcctggctgcctcctcgcagcctggctttcaacaaggaaggggttggcctatctggctgtgctcatcgtgggtctcccagttacaagtaaaaaaaatgaaatgtgcaacaggcataaagaaaatggggaaatgggctgggtgtggtggctcacgcctgcaatcccagcactttgggaggccgaggtgggtggatcacaaggccaggagtttgagaccagcctgggcaacatagtgagactctgtctctaccaaaaatacaaaaaaattaactgggagtgtttgcacgtgcctgtggtaccagccactcgggaggctgaggcaggagggggaattgtttgagcctgggaggtggaagttgcagtgagccaagatcacgccactgcactccagcctgggtgacaaagtgaaaccctatctcaaaagaaaaaagaaaatggggaaatgtttactcttaccttgactgaaagatccaaggaaaggcactttcaggcccggctggttccagagcctcaattgatgcccatccatcccgtcgctcagactctccctctcctcttcttgctctggggctggctgacattgtggctgactcacggggccgctgctgccatgagtgcactggtcccacctccatcagcattgagtgacatgatctgaacccctgtgcttggtgccgggggctcaataaaggttcagccactgggtgtcagcagcccagagcaggaagcaagatcaagtggtggatgcggaacagaacatgcaagctagggccaggcgcggtgggtcatgcctggaatcccaacacttcgggagagaggctgaggtgggcagattgcttgagatcaagagtttgagaccagcctggccaacatggagaaaccccatctctactaaaaatataaaaattagctgggcttggtggcacatgcctataatctgaggctgaggcaggagaatctcttgaacccagtaggcgcaggttgcagtgagccaaggtgccactgcactccagcctgggtgggagagcaagactgtctcaaaaaaaaaaaaaaaaagaaagaaagaaaaatatacacacaagctaggcagctgctcttgggagagattcttggctgttctctgtagcctgacgcctctgaggcccacgttggttcagcctcttctgtgggaagcagaatccacacatcctcaggctccagagctgctgttttatattattttattttagagacagggtcttgctctgtcacacaggctggagcgccatggcatgatcacaactcgctgcagcctctacctctcaggctcaagcgagccctccacctcagcctctcgcatagctgggactacaggtgagcaccaccacacccggccaactttcttattttttgtagaggtgaggttttgccatgttgcccagggcagtctcaaactcctgagctcaagtaatctgcctgcctcggcctcccaaagtgctgtaattacaggtgtgagccactgtgtccagccttgtttctctttgtctctctttctttctttttttttttttgaaacagagtttcactctgtcgcccagactggagtgcaatggcgtgatgtcagctcactgcaacctctgcctccccggttcaagcaattctgcctcagcctcccaagtagctgggattacgagtcctgacccctatgcccggccaatttttgtatttttagtagagacaggatttcgccacgttggccaggctggtctcaaactcctaacctcgggcgatctgcccacctcagcctcccaaagtgctgggattacaggcgtgagccaccacgcccagcctattttttcttaagtcacagattctctgacttatttaaagctgataggcggggcacggtggcgcacacctgtaatcccagcactttgggaggccaaggcgggcggatcatgaggtcaggagatcgagaccatcctggctaacacagtgaaaccccgtctctactaaaaataaaaaaaataaaaaaaaaattagcctggcatcgtggcgggcacctgtagtcccagctacttgggaggctgaggcaggagaatggcgtgaacccgggaggtggagcttgcagtgagctgagattgtgccactgcactccagcctgggcgacagagcgagactccgtctctaaataaataaataaataaataaataaataaataaagttgttgttgtttgtcatgaagcccttttttgtggttttagtacagtccacagaagttcccgttaggacagttgcagtcttaccatggccatgactccgtgtgtcagggacgtgtcctcctggtaccaccatgcggctgcaaagaaatttcttctctgattctccttctccccctcccacctccccagtcttactgttaacagtcccaggaatggaagagaccacatcagaggcagacaaaaacctttccaagcaagcatgggacaccaagaaggtaagagcctatgagctttcaaaaactttttttcttctttctcttctcaagcatcacctgggcaaaggtgacaaaatggcaggttggggtggcttcaccttcccaagacagggaacctcactccgatttttccatcttcaaattcagagaatctgttaggtctgttgatcactaagatcactaacagcaggccttatccaacaggccggaactgcacaaaaattacaacccaggctgggtgcggtggctcacacctgtaatcccagtactttgggaggccgaggcaggcggattgccagaggtcaggagttcaagaccagcctggccaacatggtgaaaccctgtctctactaaaaatacaaaaaattagctgggtatggtagtgcacgcctgtaatcccagctacttgggagactgaggtgggagaatcgtttgaaacctggaggcagaggttgcactgagccgagattgtgccattgcactcccgcctgggcaacagagcaagactccatctcaaaaaaaaaaaaaaaaaagaattaaaacccgttgctggtcaagttgcactgaaagggacagcaatgcaaattactcctcccctatgggaaagtgaggcaccagcctgtgccaaaatcctttcaaaagggtttgctccaggctgtgcatggctcacgcctgtcatcccagcactttcggaggaggctgaggtgggaggattacttgagctcaggagtttgggagcagcctggtcaacaaagtgagaccctgcctctacaaaaaatgagccaggggtggtgatgtgtacctgtactctgagctactcaggagggtgaggcgggagtatcacttgagcccaggaggtcaagactgcagtgagctatgactataccattgcactccaccctggacaatagagcaagaccccttctggtggggaaaaaaaaatatttgctccaataatttcttcttcaggaattcaatcattgagagttgaggaatgaataaggaacaatgtgttttttaaaggtattttccagagcttttgcaataaactagaaacagcctgcacatttcaggagtaaggaatttgttgaggaaatagtcttcagtccctcgaggagataagattctgaagaaattttaaactcatgagagacactcctgatactattgtcatgtggacagagtaggataagaatattggaaaaggcataaaacttgcagagatgcagctgcacagataccagcaggcagacctgactgaggggcgtctcacaagggttgtgcgttttctgtcgtggtgagtgtgggtggtgctgtcagccctttatatccatctgtgtatttctttttcttttcttttatttttatttttaaattttattatatttattttaattatttttattttatttttttgagaaagagtctcactctgttgcccaggctggagtgcagtggtgtgatctcggctcactgcaacctctgcctcccgggttcaagcgaagtgattctcctgcctcagcctcccgagtagttggggtcacaggcgtgtgccaccacacctggctaatttttgtatttttggtagaaacagggtttcaccatgttggccaggctggtctcaaactcctgacctcaagtgatctgcccgccttggcctcccaaagtgctgggatgacaggctcttttttttagaaatagggtctctcttatgcctaggcaagagtgcagtggtgccaccctagctcactgcagccttggagtcctggacttaaacagtcctctgcctcagcttccagagtagctgggactacaggtgcatgccaccatgcctgacaaatttttgtattttttgtttttttgaggcaggatcttgctctgttgcccatgctggagtgcaatggtaggaacacggttcactgcagcctcaacctcccgggctcaggcgatcctcctgcctcagcctcctgtgatgctgggactataggagcgtgccaccaaacctggctttttttttttttttttttttttttctgagatggagtttcactctttcgcccaggctggagtgcagtggcgcaatctgggctcactgcaacctccgtcccccaggttcaagtgattcttctgcctcagcctcccgagtagctgggattacaggtgtgagctaccgtgcccggccaatttttaaatcatttatagagacaggagcttacttcgttgcccaggctggtctcgaactcctgggctcaagcagtcctctgcctcagcctcccaaagtgctgagattacaggcatgagccacctcgcctggcctattttttaatttttgttaaagacgggggtctcactatgttgcccaggttagtctcaaactcctgggctcggtctctgtgtttcagtttggcacaaagagtcactgagatttccactcttacgggaaaaaaactttaaaaaagaaccctaggccaggtgcagtggcttacgcctgtaatcccagcactttgggaggccgaggctggtggatcacctgaggtcaggggtttgacaccagcctcgacaacatggtaaaatcccgtttctactaaatacaaaaaattagccaggtgtggtggcacttgcctgtaatctcagctacttgggaggttgggacaggagaattgcttgaacccgggaggcagaggttgcagtgagctgagactgcgccactgcactccagcctgggcaccaagagcgaaaactccatctcaaaaaaaaaaaaaaaaaaaaactctaggctggacggacacagtggctcgtgcctgtaatctcaacactttgggaggctgaggtgggaggattgcttgagcccaagagtttgagaccagcgtgggcaacatactgagacctggtctctgcaaaacattttaaaacagttagctagtgtgatatgtgtgtgtgcctgctacttgggaggcaggaggatcacttgagcccaggagcccaggagttcaagtccagcctgggcaacagagcaagaccctgtctctaaaaaaaaaaaaattctaacaacaaacaaaacaagaaaacaaatgtccagcagcagagaggtgggtaagtaggccacggtccacccacacagctggatgttctgccgttactcaagaaaaggaagatggcgacagtcaccttgcagagggagacacaccccgatagtggagtggggtggtgggtgaatttttaatactgctcagaaatccattaatgtctccataatgttggtggaatgcttttcaaagtattcttgagaacgtgatcgccggtgtgctttgcagaaatccggtaatgaagcgaatgtttactctcagaatgaaggaggctctggccaagcagaaacccattcagccggcgttctccacagaggcttaacacccgccggtcgcacgccacccctcgggcaccccagtggctgcgggttgggcattgccccctcacggtgtgtgcattttgaggccagccccaccctctgccagcatgttcgcctttttcatctgataatcctgaaagaactcagccagaagtgtttgccccagggccccaggggcggaaacgtgtcacactgggaggcctcatccatggctggggttctgtctggtcatgcctgccaagagcagaagacggtcctgcctttgtccttgaacaggagtctcgggggcccctacctggagcctgtagttccccagggcctgcagtgatcccatgtcttggctggtgttagtgcccccaactcacaggggaggaaacattggtcctccaggaaggttttcctgggcaccccctccccagggccaactcaccggcctctgtctgtgagcggtgggggcttggaggctgccctgctaccctacggtgtcctcacagccagagccagaccccaccctgcctcagaagcccttggaggtacccggcaggtctttctgctgggattatgattttctttcccattgctgtgaaagtccatacttcagtccgggtgccatggctcacgcctgtaatcccaacactttgggaggctgaggcaggaggatcactggagcctaggagtttgaggccagcctggacaacacggtgagcctcatctcttaaaaaaaaattaaaaaataaaaattaggctgggtgcagtggctcacgcctgtaatcccagcactttgggaggctgaggtggacagatcatgaggtcaggagatcgagaccatcctggctaacatggtgaaaccccgtctctactaaaaatacaaaaaaaattagccgggcgtggtggcgggtgcctgtagtcccagctactcgggaggctgaggcaggagaaaggcgtgaacctgggaggtggagcttgcagtgagccgagatcgtgccactgcactccagcctgggcgacagagccagactctgtctcaaaaaattaaataaaaataaaaaattaaaactaaaattaaacatttttttaaaaggcggaagaggccaggcaccgtggctcatgcctgtaatcccagcactttgggggccgaggtgggcggatcatgaggtcaggagatggagaccctcctggctaacacggtgaaaccccgtctctactaaaaatacaaaaattagccgggcttggtggcgggcacctgtagtcccagctacgcgagacactgaggcaggagaatggggtgaacccgggaggcggagcttgcagtgagctgagatcgtgccactgcactccagcctgagagacagagtgagactccgtctctaaaaaaaaaaaaaaagaaagaaaaaaaaggcagaggagcccttcccgagaccctgaacttcaaaggctctgtgggccacagtccaagaggagcctattgtgggccctttccatacaccatgtccatgtcccgaaagtgtcctgacagtgctcctcagccaagcagaaaaaccagtgtcatgctgagggctacccaagccctagtcagtgggggatgagtgtggctgcccacatagcagagggacgtctcgggactctcaggaagtagcagaccctgagggtccccggggaagtcacatgtctaggtctctgctgcaaagctggtcagccccaagacaggggcagtgacctctgaactgagtttagggcatcaggtccaagcttcctgggtctcccctgactcagttcttccctcctttgggccttgggcttgattcactccctggagactggtggctgctcacaaacttgcctggtgggcactggacagaggcaactcctgcccccggaacccctgccaccatgatctgggaacagcatggatggttggggacagctctagggacacttagcctcgggtaccagggcttagggcggccagcttagcagaggcccctctactgtgctggctgctgactgctgtggtacagcgttgggagtgtcaagaggcgctttacacaaaatttaaaaagcagccgggcgcagtgcagtgacgcgtgcctatggtcccagccactcgggaggctgaggcgggaagatcatgagctcaggaggttgaggctgcggcgagctgtgatcacaccactgcactctagcctgggtgacaaagtgagatcctgtctctatgaaatagaataaaaatttaaaaagatccacatgccatgttctccccagactcctctgaaaagagactgcccactgagggcaggagcagggggaggggacccatagggagaccctctctgtgcaactcttggcttcgcgctgggcatgtctggggcccgcccctccaccctggggcggtgcccctgtcctccatctgtggggctctgcggccccagcaagcttggttctcatgatgcatctctgggctttgtgggaagatcagccgtttcaaggaggcccagtgcccaggaggagggccccacagggtgtgccccagggctcaggctctcctgtcttctctttcagacggggtccaggcccaagtcctgtgaggtccccggaatcaagtaagtctccacagggcccaccccgcacactgcatctgctgcgctgctccgtccaccctggggcattctgtccactctcttgaggttgcaagtccctgcaagagggacactgtgtgaccagaggccagtgacagagcccccacatgcccacccctcaggcacctcattcccagggatgatgccctctcctgggttcagggaggttgctgcccccaggccccccaccgtcctcaccgggtgataggctgctttccaaggtctcagcctggtgccagccaacagtggtttcccaagcacacggcacctgatggggggtggccttttgcacccgctgattttctcccgccagccccctgtccccgccgccagccccgccccatgagctcacctcctgcctgcctctggccttttcccagcatcttcccgtctgccgaccaggaaaacactacagccctgatccccgccacccacaacacaggggggtccctgcccgacctgaccaacatccacttcccctccccgctcccgaccccgctggaccccgaggagcccaccttccctgcactgagcagctccagcagcaccggcaacctcgcggccaacctgacgcacctgggcatcggtggcgccggccagggtaaggcagggacactccgccctcggacagagcactggcttgtggagacaacacgggcatctgcaggatgacttggcagagtcccgttccaaatactagggcatgggggacagggctggggggcggccgacaggctgacccagcgggcacaggcatcccaggtaggggtggggcctgggtacaggcctggtggaaaggagtgcctggtgcccccagacaccagacagtgggtttgagggtgtgtgatggtgctttggggagtccaggagggaagccctgggagttttaacgcagctggggtgggccaggccttccctccgcccctcctcgaccccagcccctcattggggggcgggaccaggcctgacctgcttcctccacccgacatctgacagtgaccacctacttgtcacatcccagcaccaccacccccacccgtctccagctccacactcctttcttcctcagccacatccacagggacgtcgcacaggcccctcgcccgtcccaatagctcctggcgctgctgccgccctgctcccccgggacccccctcctgtggctgcactgattgcagaggtgtcccccaactcctctgtcctttcccagacatggacctgacccattgtcagcgtgtcctgtcggttccgccctcaggacctggcctgacctggctcctctccccaggcccccagccccctccccacctagaacagccaccagccatggcttcctccacttgggacctcgcacggcccccagctccctctcagtgaaagcctgaggcctccagggtctgggatgtccaccctggcccaccctccaccctctgaacttagccccagtcccacctcagggcctctgcacatgtagtccttcctctccaggaggctgcaggcctccctccctcccctgccctgccctgccctggtcagagctagtccccttggcaaggccgtcccggccctggcctctactgccgcgttgctttcctgcacccctgccctggcccacgttgctgctccgtccttagctgttgcctgcgtccccattggctgtgcagtgtgtgacctgcatcccgggggtggcaggcacctggcttccaaggaggagaaatggcgtggccccaactagtcctggggggtgggacaggctggaggggctgtgggggatgcactgggggtgggggtgacagacgccaccttgctgtgctctgtcttgccccagagctggagaatgaaccggccccggcccactccaccagcccatcctgcctctgccccaggcttggaaggcagcaccaggcagggctttctatgagatagtcacatgcttacatttgtaactggcggagtccccctggctgccctggaagaaggagcttttgggaggggcggccactggagcaggacagcaccccaattgggggctctgcctggagactccagggtgaaattggccagcctgggagctgggttgatgcagggagtgaaggagagggaggagcctggaggcgttcctggctttggtgccagcagggccaggggcaggcaaggggcgtggagggtggcgtgaatgttcctgggttttttggaggagggcatggggactagaatagtgaagagggaacagggccccagcccgagcgcattgaggctgcattctgactcccacacctgggccctgggccctgggcccgcggggctctgccactggacagagggcaccagagaaggcccagaaaacacagccgattcggaggagccctcttcattgtctccagatagacagggccaggcaggcggcatccacacgcacctgcgcagaaccagaaagctgaaggtcagcgctggggctgcaggtacccctgccccgcatagaagccaccatctcccagcccctgcttttcccctcacatctcttcacggccaccagagcacatggcccccttcccgctggagggtccttggcaggtccccagcgcccgcccgggagctgcgcacctccagcaggcacccagtctaaacaagcacaaggaaacacacaacatacgtggaagctggagccggcgctggccagagcggcccggtaatgcctgacatgtgttgggttgtttgtgaacctgccgcccaagcagctcgcctggcaggggctttgctttctggacgccttttaaatcaagccgagctgccggcccctggcacacacgaaggtggccccctccctcctcgcaagcccacccgccagtcagaacgtgagctccctcaggaaggaagacagaggccttcgcggccgaggagacagtaccccgcttggctccatctacatttcccatatccctggctgctttccagagtgcaggaggagggcaggccctggctcctccttcctggcccagctttgaggccgggcgggccctgacacctggcccgccctcccctggcagctctccctgcccgctccagacttcccctccagctggctctgtgcctgttcccaaaggtgagccaggttgccaaaaggaattcaacagcaaggctcccgtccgccctcctgggccaactggcctctccaggggtggccgagagctcactttgcagccagtggaagattaaaaactcccttgtattcagggcagacattagagactggcagcccaagggccaaatccagcccatggtatgtttcgtgtgggcccacagttgtgcatctgtaatacagccacacgccacatcttgacgtttctgacaacagcaaaccacataatcggcagtggccccatcagagtataatgctgtgtcttactgctccttttctaggcttagacacacaagtccttaccattgtgctacagttgcctactgtttttaattttttttttcttttttttgagacaaagtctcactctgtcacccaggctggagtgcagtggtgtgatctcggctcactgcaaccttcgcctcccagtcccaagcgattctcctacgtcaacctcccgagtagctgggagtacaggcgcccaccaccacgcctggctaatttttgtatttttagtagatacggggtttcaccacattggccaggccaatctcaaactcctgccctcaggtgatccgcctgcctcagcctcccaaagtgctgggattacaggcgtgagccactgtgcctggccgacggtattcaggacggtcaccctgtacaggtttgtagcctgggaacaagggccctaccgtctggccgaggtgtgcagaggctctgccatccaggtttgtgtaagttgccctgtgatcctcatgcacagccatgaaatcgccggacaacgcgttttttcagaagtcacccccattgttaagtgatgcttgactgtacttagaatcaacattgaaaaaccaggggaatgcccgtagaacaccagatttctggctgctcttgaagaatcagacagcccagtggccatggccgatgtcttgcacctcgagacgggccacagtgctctggtttgcctcaggccccacccgcccctgtcgtcccacatccataccctcacacgctcctgacgtttgcccctactttgtaccgagcccgacctctgcttctgacctgggcactgagcatctctcggcctgctggacgcacgaagtggcggacactcaggagaagatgagggagtggcccagggtcgtgactctgagtgtgctctgagcaggcttcccccacatcctcccgtccaggcctctgttgatgcctccctggacgccagggcctgcaaagggcgcttgctgcctggggagcagtcaacagcaccaggcttcctcccacagtgcgcagccaagcagagctgccagggcatccgaggggaagtgcaggcgtgaccgagctcgccccggtgagcagctgccctgggcacggacaaggctgtcatctcccctcggcgcttgtcgggtgtgttcccatgggcccacgcacccgccgtctcatctgccggaacaaggttaatctggtgcccagatctcctggggtgagtcaggcggcttcacccccgccttgactgcaggccagatgctcttcagagactgctcctgacctcaccagggcctcactttgaaccggagagggcggctgttatcgtcgccatctcaccaaccagggaaccaagtctccagagtggatgggggtcaggccaggctcgcaggggtcctcctgccatcgaggggcctgttgcctgcctggcatggtgcccacaataacccagccagccccagctactgccatgttgaacttgacctcacccagcttcatcactgcagcagaatccaaggattgggttgctcagtgcaagggccttcggggccggggtgagggaaggggtgatgaggcggctcctggcaggacctccagcaggaatgatgtgtcagaccccagggcagagagggggaaggatgttaaggagtgacattctttagttcagacagcctgatgggtggcactgcagcttggggaatgcaccaggtctggggaggaggaagtggctgtgggacataggggatagcaggtgctcaggtctgggggccaagagaagcagctgcaggaatgggcacattcactgaaggagggcaagatccacgaggtggtgggcaaaaccacagcattgggcagggcctgctggcttgaagctaaccacaacccaagccattttcagccaaaaaaaaccatttattgtctcctgaaagtgggaagcaggctcagatgctgcctctcccctgcagcccttcagctggctcctcacctcgccacaggatgccccacacacggcttcagacagcccttcctggaattccatccaaagcccctgggaaggctctcattgggccagcctggttacatgcccatctgggggccaatcttatgctccagagatggggatgtgctggttggctggctgtgagacacccccttcctggaaggaaggagaacagactctgcaggactgtgggaccctcgggtcaggaatcagggccttcggggggtgcccaggtttggcagttgggacatgtccatgggcttctgtctgagcagttgagctattcccatgcagtgtgactgtgggtgtgtaagcagccctttctcagtgatcagtctcacacctgctctccctccctcctacttcctctctaggaatgagcacacctggctcctctccacagcaccgcccagctggcgtcagccccctgtccctgagcacagaggcaaggcgtcagcaggcatcgcccaccctgtccccgctgtcacccatcactcaggtgcgagggcaaggtggggggcaggtgggagggggaaagggaaaggtggaggcctggctctacctcttagaaggcctcctgttccttccaggaggccacaaaaccttgagaatgctcccaacacttttagtttttattatcaaattttcaagccgggtgccgtagctcatgcctgtaatcccagcactttgggaggctgaggcgggtggatcagttgaggtcaggagttcgagaccagcctggccaacatggtgaaacctcgtctctacaaaaaatacaaaaattagctgggcatggtggtgtgcgcctgtggtcccagctactagggaggctaagatgagaggatcacttgagcccagggggtggaggctgcagtgagccatgatcacaccactgcactctaccctgggagacagagtgagactctgtttcaaaaaaaaagaaaaaactcaagaggttagcttttgatttttcaatttgctgtatttgcttgtctacttttttgggtagtttgtatgtgtctaggaatttgtccatttcgtctttgctatccaacttgatggcagaaaatttttcataatactcttttgtaatcctttttttttttttttaagacgaagttttgctctgtagcccaggctggagtgcagtggcatgatctcggctcacggcaaccttgcttcctgggttcaagccattcacctgcctcagccttccaagtagctgggactacaggcatgtgctaccatgcctggctaattttttttttttttttttttttggtatttttagtagagatggggtttcaccatgctggccaggctggtctcgaactcctgacttcaagtgatctgcctcctttggcctccaaaagtgctgggattacagatgtgagccaccgcgcctgaccgtaatcccttttttaaaaaaatttttgagacagagtctcgctctgtcacccagggtggagtgcagtggcgtgatcttggttcattgcaactctgcctcccaatttcaagcaattcttgtgcctcagccacctgagtagctgggattacaggtgaccgccaccacgcctggctaattaaaaaaaataataatagagatggggttttgccatgttggccaggctggtctcgaactcctggcctcaggcaatctgcccacctcggcctcccaaagtgctgggactataggcgtgagccaccacacccagccttgtaatcctttttatttacgtaaagttggtagcaaagttcccattttcattttctgattttagtaatttgaatcttccctcttttttacctaatcaatgcagcttcatagaatgagttaggaatgttcacttctcttctattttttggaagtatttttaattcctctttaaaagtttggtaaaattaggcgggtgtaatggtaaattcctgtagtcccaggtttggtaaaattcaccagtgcagccacctgtgtcttagctcaaatgtgttgggaagtttccaatctcatctccttcttataaggctattcaggttttctgttttttcttgagtcagttttggtcatttgtgcatttctagaaatttatccattttgtctttttaaaaacaaaacaaaaaaaccctaacagagaactttgacatttttaaaatttttttattttttaattttaatttaattttttttttgagacagagtctcactctgtcgcccaggctggagtgcagtggcgtgctcttggctctcctgcagcctctgcctcccaggttcaagcgattttcgtgctagcctcccaagtagctgggattacaggcatgtgcctaccatgcccagctgagttttgtatttttagtagagacagagtttcgtcttgttgaccaggctggtctcaaactcccaacctcaagtgatcaccctgtctcagctttccgaagtgctgggattgcaggtgtgagccaccgcgcccgtcacttgtttgtttttaatgtaaccacagtggcattgtccacctacaacgaagttaatggtagttccttggtacctggcaatgcccggcccggactccatttctccccgcccctcggcccccatgtctcctgtctgcttacaaaggtgtcttattcagatcaagatccagacagagctgtgggcgctggctcctggcagctgtgtcttcagccactttgtgagctaggctgtcttaatctgacacctgccccttccctctatctggaaactcctttctcttcacaaatgacccactggtcctcagaggccgggcatcctgctaagtggtttttgttccatagctcctgggcacgctcagcctttcttagagggcagggaccccacctttcccaaggactgtcagcttggtagcccctggctgtgagtttccacacagacagtgaacgtcacacacttccctcttattgattttcctctttccagctctgcgaaggcctgagccagcccttggtgaggggccatgctggtatctccagcaaccccagcctctccagcatccccagagtgggcaaggctttgggcgggggggtttgggaaggcaaggccagtggatcacttgaggtttccccgcagcacccacaggggctgggagctggctgctcactgagccaccagggatggccatcctgggcttgccctgcagctggtggactggcctgagctgcacggcatgtagtgcgggtgcaggcacaacaagctggaggaggtcaggtcctgcccagctccagctgacccccttggggccctgcgtgaggcccaccctctctagcctgggctccctcatcgtgaggagcacccagcccaggggctgcctgtgatcacagggcccttccacctcgcctgctgagcatgccaggctatgggggcccgagggggccaggcgctgacaaccagggcccgccctgcctgacgctctcctctcctgcaggctgtagccatggacgccctgtctctggagcagcagctgccctacgccttcttcacccaggcgggctcccagcagccaccgccgcagccccagcccccgccgcctcctccacccgcgtcccagcagccaccacccccgccacccccacaggcgcccgtccgcctgccccctggtggccccctgttgcccagcgccagcctgactcgtgggccacagccgcccccgcttgcagtcacggtaccgtcctctctcccccagtcccccccagagaaccctggccagccatcgatggggatcgacatcgcctcggtaagcccagggtggggtccctcggggcctgactgggggtcttgtagaggacagcccgggggctgcagaacagtcgggttacctgctgcatgggccaggggtcagaaccccagcgaacgctgcctgggcccacctctccacggggctaccccttggaatcaaactgagactgtcactccctgtagagatggagaaactgaggcacgagcaggtggctggccccagattccacccaaggtgggccaccccatgtttaactgccgagcaccccttcttggcctctctggcccctcccacctgaagccaggcttcctaggaggcaagaagagtacggcgttctcagggccagggcgcaggccgggggccggggatgacgtgagcttatcagagaaggaaagacgaggccagtccaagaggcggcagcccgttgggcacagcgcctggggcccagggctgggggctgcagctcagaccattggacttttctgcctagggccggctcaggcagacaaaggctgggctttaaccctgtacccacaaaccttcctgactgtccagaccacctgcttgctccagcggcgcgggctgggtggcaaacagctgcattgggccacatccagggaaacagggacttgtgttccgggcacaatgagtcctcccacttgaccccgactgccagccccaggctaaatgtcctccaaacattgtgtgctctgcaaagaacagccgcctgagctgggtggggcaggcaggtgagcctgtgggtagacacccatgttcccaagctgctctgacctcacggaggggaccacccacggcccctgggtggaagagtgcccaagtcctttctttggtggaaacacagcaggtcctgggggaggctcccaaggtggggcctcgccttggagctgggtggttcttggagtcacagggtgtctgggccaggtgcagggacggcccttctagggctcttgggtcaggctgtccatgtccagcaccctcacacaacaaagacggcttcctgcccccacttcaaggacttctagcctcctggggttgaggggggactcttgagtttttgcacagactcacccaaatgagaatctccctctgatccctttgtcctttccaactccaggaaggcccaagtcagccatccctaagtaacagtgctggcacctccatcacccacgcaggcgagctcaccgccaccccccgccctaccccaccccgccccacctggactcaagccctaccccaaactgcccagaaggcgccaccaaggacatgggggagacagcaattataggccctggaccggtcaggctgggcctcattcagtgactggctcagacaggtcaggcaagttgtctgcaggcacacagcatggctgggccgtgctaggacaagagagtggtctgaatccggggcctggcctggcccgacctgcctctgaaagttctgggtcatagcagtgagatgcccgggcctttcgtccctcgagcaggtggaggaagtgactgccccttgcaggtctcagatggcataacccaggcaggtttgtcctgcagcagggcagggatagtgactgcgccatgctgggagcctgggctaccagcaagatggccttcactcagtccccacccccagaggtgggccagacctgctgggctgcagacttaggggcttagagagccaggggacctgcccagggcacacagtcagcgagagccgggaacaggaggcagccttgggttttccctgcccatggcggtgtgtgtgtgtgggttgtgggtgtgcacaagtgggtgggtgcgggtgtatgtggtgtgcacctgcatgggtgtgcatgcatgtgaatgtgtgtgcatgtgtgcatgcgtgggtatgtacatttgtggatgtgtggacatttgtggatatgtggacatttgtgtgtggatatgtgtgcttgtgtgggtgtgtgcacacggtgtgtacattttggtgtgtgaatatatgtgtgtgtgggtgtgtacatgcgtgggtgtgtccatgtgggtgtgggtgtgcatgtgggtgtgggtgtgcatgcgtgggtgtgtacatttgtgtgcatgtgtgcatttgtgggtatgtacgtttgtgtgtggatgtgtgcctgtgtgtgtgcatttgtgggtgtgagtatgcgtgtgtgtgcatgtgtgggtgtgcatgcatgggcatgtacattcatgtgtggatatgtgcacatgtgtgggtgtgcatgtgtgggtatgtatattctagtgtggatatgtgtacacgtgggtatgtctgtgtgggtgtgcatgcatgagagtgcacacgttgctatatggctctgagcctgctgagtcagggccaaccctctgatcaccctcctgtagctccaagaaggagggcagttattcaccctccacgccgttccttcctgggttcgggggcagctccccggaggctcaggtacccacctttcctgcaggtgtccaggctcctctgcctaccagtggggtggcgaccatcaccaaggtgtgaggggcggggggacctgcctgggggctgatcaggctgctcccgggaagcagggactggagcccgggcttgggcagctgggctgcggcgtgctgatctgtctgtcatcgcaggcgccggctctgcagcagtaccgcactagcgccggctccccggccaaccagtctcccacctcgccagtctccaatcaaggcttctccccagggagctccccgcaagtaaggggcgccgcctcccccttggcctgtgggctccacgcttgtcttgttcatgccccgtgtgttccctgcccactgtctgtcctcatgcatcgctcctcatgcatgtcctcatgcatcccatcccgtccacgccatcggacctgagctgtgcacctaccaggctgcaccagggcaggaaccccacagggtccttcccaggagccgccagagcctgcctctgctgaacactaggtgggggtgtgcgttagtgacattagcgatggctgtggccctgcctggatgtcctcattgagtggcccagggacaatgccctccacacccagtgtgtcacccagagcatgagctggagctttagggacccccccgacttgggggtgcagctgaggtggctggcccgcccgcagggaaggcgctgactctgcagccctgctttccccttcaccccataggcagctgtgtttctccagaaccactggcccaggaggcttctctgagccgctctgcagtgtctcagggcccttgtccccattccacagacgggagactgaggtcagcctcaaacctcacccatcagccctgggttttcctgttgcacccagcaccgtaggaccctggcttgctcacgccccagccactccaaggttcaggttcctcggaatgccccttcgttctgcctggccagtggaagcggccagcctggctccccactcagcctcctcctgttgtactttgacatcaggtgtggccagtagaccccacattccatctagaacatttgtccgggagaaggggtgcccacaaggccaacatccagccgccaactttttttaccctggcagcagagcctccccagaaccccgctatcctgggaccatctcatccctgaaatttcaccaagctgagaaacccctagcagccactgctgtgcccggggccctgaagccatccctgtcccctgtagaggggatgctctcgtcctacttcccagctagataaaagagtcgctcctccagggctgaggtcgggctcccttgtcccagggcaaaccgtgagcgccacagacaaggacagtgaagcccctctgcccccatctccagctctcacacgtgtatagggacatctgccccatcagccaagggccgtctgggaccactgcctgtagccccgtgttctggaggcaagttggtgggcagcagtggtctcggggaggcatgggggtcagcctggtgtctgcgcatgcttggtctgcccgcactggctctctgagctctcgggctctggcagcgtgtctggtctcgtcgtgtggtactgttggggatggggctggaggggctggagaagcggcaggtgaggcctgtcccaggtgggcagcccaggtggggctggttcctgagtgaggtccctcttgcatgtgagacaggacgggacaggaattaggagtcgagccagtttctctcaggagagagtcactggaatggttggtgaatttttgggccccaagccaaagcgggttagtctgctgggcagcgagcaggtggcggtgttgtcaagcccatgtctgtgtgtctggtgtccgtcgtgcgctgatgcaggaggcaggcggctcatggaggtatagggacatcagtacggggctctcaggggcagatggttctaggtggagccgagacctgccttccctctgcactgggtctccgaggactcacccatcggtcccacaggcccagaccaccccacacctgctgtgtcctgccttgagtagccactgtgtgcaccctagccaggccctgggccacaggcagctaccatttggtccagtttgtggctctctcccaacttcaagctcacctttctggcaagccctcatggcaggctcacagggaaacctcagcctgtgttcccctgtgtatgccaggcctttttgagcccaagccctcagggacaggatcaggcgctgtcctggaagcctggtcccaccccacaccccgagccccaggacagacccagcttcagaccagctctacgacagccaggacattacctattgcctgcctgcctccctcgcctcgggcaaaccaagccgcaagcttgcggtccttgtttccaaaacctgaagccgttgatttttagggccaagatagcatttttgccacacgtgctggccttcccttccttgggtcacctttttacctcttctctggcgtttgagtgggacgtccaacctcacaagcctcctcgccccagggtgagcgtgtctgtctctgttgtctgcccactgaccaccaggagcaactggtgggtttgtggccggcccctctctgggattgaggccagagactcaggcgttgggatcttcctggaacaaaggggatctctctagaacaaagctcagatggggagctccaagggagagggccagggctttgggtctgtggagacattcacctggacgccttatagggcacatgccttacgctatagctctgagaatggctgtggggcagtggcttcctggggacactagccagagctcccagccccctggatgctgccaggcctccagcagccacaaggtcacactgcagctggggttcccgaggcctcgtccacggccaccccctcctcgcctccacaccccagccagacctcatcccaccatctcttggggaggggctccgagtgtctcctttctagcgtctccaccacccataaggtcccctagccccctgctcctgtcaagggacagcccctgtcaccctgcctctgagagccctgctggcctcagatagcaggagtagggccccgggtcctgcaggctggcagccctgggcaggggctctccctgtgcctgtcctgtgctctctcagctggtggctggctctgtgcgcccatcctgtccatgtacgtggcctgcgtcgtgtcctttgtctcctgtcaggagtcaccaagtgcactttctgtcctgaatgtaacgtctgggcacttcccgccttggccctggtgacaggttctcctctggggcctgttgggtgggggttcctcatccctgtggcccccaacttccctgtgatggagatagaggctgccttacccaggcttgaggagaggagatggggatggggccttgggaaggggctttcgggttgcagaggcctcccaggagcaggtggcagaaaaaaagtcatccaggattggggggcacttctggaaccccaaaataagcatcatcatcagcctcctgccgtctgggaggttccaggggcctcttgtcttccagccgggcttgggaggtgccgacttcccacctggcctcaggccgtgaccacagcaggcctctcttctgtctgcagcacacttccaccctgggcagcgtgtttggggacgcgtactatgagcagcagatggcggccaggcaggccaatgctctgtcccaccaggtgagcgggcgcccaggctgccagccggccggtgcccaggacagatgcttgctgggaccctcgctgggacccgggccttgcgagtcagagctgcacgtgctcggggggcccgtgcctgcccctcagctttgcccctcggcccccgccccgtcccatctgcgggctatggaggctgagtccccggcaggggtggcctagcgctgcctcccctggcatctttgcccacctacagagcggaggccgagggcagagggtgagggggggcaggcagcaaacgccgggccagacagggatgggaccgtggctgtggacgcggcgcctcggcatggaccgtgcacgcgggtttgccgggaggtcgtgctggctttgcgtggaggccaggatcgggggcatccagggggcttggtggcagcctggagctgctcactcatttgctcatccattcatccattcatccagccagtctctagggtggcggggaggccccaggtggcgggtggagtggggttcgtgcttggcagcctgggtgccgagcatcctgcagggacagagtccccagctgcgggcaggacagccacagcagccaagggcttggggtggccagctgggcaggcccgcggtggccctcacagcctggtgtgcctcccttcccagctggagcagttcaacatgatggagaacgccatcagctccagcagcctgtacagcccgggctccacactcaactactcgcaggcggccatgatgggcctcacgggcagccacgggagcctgccggactcgcagcaactgggatacgccagccacagtggcatccccaacatcatcctcacaggtgaggccaggccgggggcgcgtgtgcggcgccccaaggggcctcagcccgtgcggagacagccagagactgctgtcccgcagcaggagggttgacagggccggggttgtgacccaagcttgatgggggcctgaggaggccacaccccctctcccctgaatttgactcactcctgggcttcgggccaggccaggccagggagatgcctctggaccagacgtcccgtgcataggatagagacggtcactctcccctctcggcggcctcctgtctggccaagcagcccgggtaaaggtgaagcagccgggtacacggtgcccactgcccaggccactgacctgtcagctgaatgtgcaccagggtcagggacggctgtggggtgggccctgtctggtgagcccagcctgggcagccagctaacaggtcagggccgtgatgcaccgtgacaaccacgcccaagcagtctgagcacggcgcctgggctcctggggacaagccagccccgtcctgcatggcacatatcaggaagacccggctccatctagcacagaacccagaccctgtctccctgctgaagaagatgattcccttatgagtcagggctgctggattgagggtgatgcgccccctggcagtcctcactggcctcttccaggctggaagtgtccgtatttagtgctcccccactgtggcctgggctctgagtgcagaatccagcacctccttcccacccctcgggtgtaggcagcagttgacgagaaattcaagggtggacgcgccagcctcagactcaggagaagaatcagaatctgacccccgcaatggcctcaagagcccagaaagacagggcgtttcagccccatttctcagacctggaacctgagtgtaggtggaagcctaggtttgaacccgggtctttgtgggggaactgaggattccctccagccctagcagcagctgggtccccacagtcactccagcctgcttctcagtgactcgtgccgagcagccctcatggctgagggagccggggaggtccctgccctcgccaggtcatgctgacgtgcatcagtgacacagcccttggcccgaggcttctccttggtgctcctgacatctggagctgacatctagggccagactggtctctggggtccaggcactgtagggtgctgagcagcatctcatgtgctggcccctcccccagtcatgacagctggaatgtccccagacattgccagcatacccaggggacagagtcgcccggcgggcatgcctggtccgacacatggatgcgagcgatggagccagggctaagcagtgccttttgtccccaccccatcccccagtgacaggagagtccccccccagcctctctaaagaactgaccagctctctggccggggtcggcgacgtcagcttcgactccgacagccagtttcccctggacgaactcaagatcgaccccctgaccctcgacggactgcacatgctcaacgaccccgacatggttctggccgacccagccaccgaggacaccttccggatggaccgcctgtgagcgggcacgccggcaccctgccgctcagccgtcccgacggcgcctccccagcccggggacggccgtgctccgtccctcgccaacggccgagcttgtgattctgagcttgcaatgccgccaagcgccccccgccagcccgcccccggttgtccacctcccgcgaagcccaatcgcgaggccgcgagccgggccgtccacccacccgcccgcccagggctgggctgggatcggaggccgtgagcctcccgcccctgcagaccctccctgcactggctccctcgcccccagccccggggcctgagccgtcccctgtaagatgcgggaagtgtcagctcccggcgtggcgggcaggctcaggggaggggcgcgcatggtccgccagggctgtgggccgtggcgcattttccgactgtttgtccagctctcactgccttccttggttcccggtcccccagcccatccgccatccccagcccgtggtcaggtagagagtgagccccacgccgccccagggaggaggcgccagagcgcggggcagacgcaaagtgaaataaacactattttgacggctgtcttttatatttctgagcacacacagagccctggcgtccaccggggcaggcgcaaagtggacagagcatgcagggcggcggacccccccacgaccctcctcgccctgtctccatcccctcgaagccctgcctcaccgcaggcaggcccatcggtggccacctttgccgggaagtgaccggaaggccccgtgaggggtcgaacgcggaggcaggggttacctcttggggctttacaatccgtggcccctcctgtcctgcactgtggtcaccggtcctgtcatagatgctgttaatttaaggtacaggcagaggtggccaggggagtttcattgtggtttttttttccttttagtttctagttacattttggttgtagatgactcgcttaatcttttaagccaacacttgcctgagagcatgtttttatttcagaaatccaactttacctattttttaagctaactggaaatggaggccatgcgccccaaagcagcccgccacccacctgagtgtaagaagtgagtccggcttttgggtttcaccccaagttatctcaaaacaaaagggctggtcaggctgggcagggccttgtcaggagctcacggtaggcagaggtgcctctgccagggccacagaacagacttccgggaaggggccttggcttttattgagggtctctcaaagacccagcctgccagcctctcccagaggtgcctgctagtccttagagtgtgtgtgtgaagatgccatgaccagtggcagctgagacctctctgccccaagagtgtgggggactggcagggagcgagggtccccgagacgaggaccacggtcctccctgagaacctgggtggaactggcatttcatcccctctccaccctaccctctggctcctagcccacaccccctctcttgggcagcgtggtctgctggctgccccttcttggcagctcagggtcgtggcaggtggacttggagacacacagcagtgtgtgttttagtggcaggtttcaggagcacctctaagaccagggtgacagggtacttgggagctgtcctggaccctccccataccacgggccctgcaagggaggcatcagggctggctttgttttctgctgttcttggaataggaactgctgttctgatccccccaaaactgcattgcggctctcgctcgctcctgcctgccgggacagcgccttctgctgagtccgtttatttgtagtgtcatggctgctgctttcactggggtcctgggcaccctggcttctgtcctcagagctgggtttgatcctagcaaccatcccttcctctctttgcccggcaatgcctttggcatgtgtctgagcagccaagtggccactcataggagaaggctccctggtcacgttgctcctgctgccgtcttgttccaaggtgcgggggggacactgttggtctgtccaggtcaaggtccctttctcttaccatgacagaggctgggggcagacagcggggacttttttttttttttaagaaaaactacatgtacataggagagtttcattaccattagacttgtatgtaggacttaaaaaaaaatggccttaataaaattacaagcaacccgcctggatgcggttttcaaaagaaggcattgaggaccatgctaggaaacctcataccccatccgtccaacctccggcgggcgccactgcttgtcctctggtcttcggtgtggacagataggagaggagggatgcccacctcggagcatcccaggcccgtggcccattttcagcatcctgaagccagattcacagtgacattgtgttaacgtgacgaccttggtccattatggagttctttttccaataagaacctggtggaccgaggtccgagcttgccagggacagtggggcccacgcgagtacccggggcccagccaggagccagcagccaggcgtccctgtgttccagaaggattcacgcccctcctggacctgggcgggcctcccagggggtctgtatcacggccttttgtgtgtgcgtacgtgtggtttttttaaatatcactactacatattcttgaattgccaagactttctgaaacaagacagcttaagggaatcagccttttgctttgtgatgtgaaaatactgtgatttgacgagccgcttcctgaggggcaggcccacgtggggaggttgcgccgtgtacatagacccgccgtctgtgtccttggtcaggcccggatgcttggtctacactgggttagaggctgctctccccacgcacccatgtgctcatggcttctgcagaccctctgctgggtacatcggtcccctacggcgaagttcagccagggctctccctcctgagagcatggcgtccccaccttcctgtttcgccgacgtcactacccagggtggcaagtcttgcaggcagagggtgtagcccaagttcagcctctctctgtgtcctccagagaagagggttctttgccctcatcagggccctgcttgtgggttttcggctctggggaggagagtgttggcatcagtgtgtttggcctgatttcttcagggggccaagctcccgggaggacccctagccaggagggccccccatgtccatccatccctcctgctggggcttggatgtcaggcttgggggctgtgagctgggacctcgcctgagcccggtcaggtgggacaggagcctgccagaagcccatggggggccaggccgggtggcttctattttatttttttagagatggggtcttgctgtgttgcccaggctggtctcggactcctgggctcaagcagtcctccctcctcggcctcccaaagttctggggctacaggtgtgagccacttctgcccagcatcccaggcctgaacagccttggcaggacccgtccctagagggggctctggtgcctcccttaggtgggccttgagctggtttttaaccaaacatccttccaaactcgggctgcgacctgcttcctgagttttctgtatttccaaggagccctccgaccagggagaggctggtggagtaaggtccagcggtattcgggggtcctctgtcacctcgccctgaaaacagcagctcccatcaccttcactgggtcccgatggagccgtctcagaggccgaggggccctctgtgtgggggtgggacgcaggggctctcagagcaagggccacaaagccgatggcacagatgtgcccctgggcctggcccgtcacccacatgtggtgccctgggccagggcgtgcgggcgccagagccttccctacacagcctaagagcaggggcaagactcggcccctcactcaccctgggaggcctgcctgggctacatggacacctgggtctctttctacccccattcaccatggaccaggggcctccatttcctgggggctcttgcggcatgtgatttgggggtccctgggacattctcccgtcagctccacctgagccaagtgtcctgttccctgcggcccttggccttccagggtcctggccaggcaggggtcaggcaccccatactcttccgtgtggcacaggtgtccacccacccccactggccacagacaccattctccccctgggagcaggaggtggagtaagttgtacccccaggcctgggtgctggggagttcctgagggcatgggtggggcaggagtgagtgcctcgtgatcccagcctcagtttctctcttgtcactttctcaaacctgcaggtctcagggccccgggctcctcctgggcaggatggggggcaggggctgggccttggggtggtgctggctctgatgattccagagcctgtatccaccttctgggctcctggccagcaccccacccccaggagccagggacaggtggcatgtgttggggtcgggggatggcccccatctcgaagtgttctggaatttgggggcaacccttgcccagcccagccatcaagaacttctgatctcctgcccaccaggaggggacttagccatggacttggccagtaggcctggggagggagggctttggcagccaaagtccactggccctgccgtgcccctgagtaggaaactgtcccctaggggctgggtggccccactgatatatgcaaacccgccggtccgagccctgttcctgcctgtgctcctctgtgcccaggctggctctcccccaaccctagcatgtatactctgccacggacgtcccgtgggccatgattgtgggcggccgcagcgggcgggggcaggcggctcagggcacactcggccgtccctgccccatcctctggcagggctgcttttgtctttgtacctttgcatcctttgtaatgaaacgtaataaaaatccaacgttttcgtcactggctcttcctcttttttctgagcccctccctcctccctcaggggtgacacatgggcgtggcaggtgcactggcaggtgcctcaacccttccgaacacacacacacacacacacacacaccccagaccaggcaagggaaggggtccccaaagctgggacaactgggaacctgccccccagaatcctggggcggacactgtatcggggtctcagctcttccatggctggcatccaggcctgtgaccatgaggtggtgggtcgtggaggtggacccaggggcctccccaaatcccaaatcacagttggacagtccctggcaggccactggcactcagcagcagctgcagcactgaggccttggtttggggttccctggcccgaccctccctcagaggcccgtccctactgtctccatgcagcaaaaaccacagccgccactccctgcacacacactttattttgtcctctctgagcccttctcacttccccctcaggacggccaccccttggggctgggtgcagagcccccatccagccgcggtgagggtggctgtcatccggcgggtcctcaccctggtccctaggcttgccgcagctgatgggtctcatagtcctctgggatggtgtctgcagggagagggcaggcgggtgagggctgagaaggccagcagggcctgtgtgcagactccccgcccacggcccgctggccctcggctcaccattgcagcggtaacgcaggttggcccagatgatgttctcctgggagaagcagaagacccccaggcggccaccccgcatggttgtgtccaagaccacgttgctgtcggccaccagctcagggccctcatagaatcgcaccctgagggtcagacatggtgaggcctgggggacctgggccagacccttccctctcagagcttcagtggccagccctggaagatgggtacccctgactgggctgcactgggagcaagtgaggcctctgccttgggcctcagtttcctggtgtggtggacatcaagggccctggacatagttggtgctaaacagagcacctgggcttgctagcagcatggaatggaggctgagaaacagggactgggtgaggccccatttctagctggatacacactgtgtgctgtgtcctggccagggtctcgctctgtcacccaggctggagtgcagtggtgcaattactgccaccttaattcccagactcaactgacctcagcctccctagtagctgggaccatgggcacgtgccaccatgcctggcatttttttttttttttgagacagagtctcactcttgtcacccatgctggagtgcaatggcacgatctccactcactgcaacttccgcttcccgagttcaagcgattcttctgcctcagcctcctgagtagccgggatgacagggccccgccaccacacctggctaatttttgtatttttagtagagatggggtttcaacatgttggccaggctggtctcaaactccggacctcaggtgatccacccgcctcggcctcccaaagtactgggattacaggcatgagccactgcgcctggcctaatttttttcttttttgtagagacagggtcttactatgttacccaggctgcctcgaactcctgggctcaagcgatcctcccatcttggctttccaaagtgatggggttacaggtgtgagccaccacgcctggaccagcataggctcattctaactgccctgtatctttcctatcgtacagatgaggggaccagggtcacacagcccctgcctggccagggcactcccacctgggcctgtgtgtccccagcccagcccaccacagagggtggagtccccacctgatgtagcccacttggggccggtgctgcaggaaccaacgataggacttcttgtccttccaacccacgtttcgcgggtccttccacagcagccgcacctgggactctgtgtctcctgtatgccacagagcgttccgcagctgttccccggggcctgtggaagacttcacagcctgccaatacccaggaaaggtggtcagagacctcgtgggccaccggagcccccctagacaccttcctggagagacagttgggagcagcaggtggtgggcggccagggggatccggatgagagacccacaaggaagccttcttcaggggccaaatggcagcttggggataggtcacagggggcagcagtggtctgcaggttcatgagaggatttgggagtccgtggacagattcagggtctgggaggatggggggctctgcagaaggacttggaaactaaggaaaagtttagggctgtgtgagagggtttagggtccataggaagactggggggccctgagaatgtttgagaatttgtgcaaggaactgggaggatttggggactgcgggagcccagaggagggctgggacagctttgaggtccatagtatgaggctagggggctggggggctctaagggctgtaaagggttttacggagggtcatgggagggcatgaggaccgcagaggtcaggcacggacggccctggcaccttgagttggatgccaggctcggccacagcacggaaggggttcgcctgccaatacgtttgctccatctgcttccacatgaccacgtagaagctggagctgtcctggtagccaaagatgaagcccgcatagtcgtcatccgtgaccgtgttcacatggaacgtgccctcgaagtccacgccattgaaggcagtgtaacctagggatggaaagagagcagtggcctttccgaacgccagccccagcccccggaacctggcacccagaacccaaacctgccccctgggtcccgatctgcctgcagacctgcaccattcccactcgcagagcccggactcagccacgccccccatctaccattggccacgcccctccagagtccacctccacttggccccgcccttcccgagcccgcccctcctctggccccgcgccttctcctcccgggcccgcccatataaccccgcccctctgtccccgcccttcctgagcccgggccagcccccttctggccccgcccattctcagcccgggcctgccccttctctggcccctctccctgagcccgctccgtggcaggatagcgctgctccccgcttctcacccacagccaggcctgggtcgctgttcattgtctgcacgatctcccttccctgatggggtcaaagaaaggagggcctcaggctggccgtgacagccctaggcaccctgtcctcagcataggcctcactgtgggggttctagggtcccatcaccccccacgtggaccccgctcccacctggttgagcaccacccagttggggtcaatctgcgcgtcaccctccgggtccagcacgactgtctggaaggccctgaagtcggtgagcgtgacttcagcgttctccggacacacgtcgatcttgtctaccaccttgtctgcatcaaagtcgtcctggcacacgtcgcccacgccgtcccctgagaggtgggagacccctcggtgggctaaagtcagggcccgcccaccgtagaccccgcgccaggagcccccactggccccgcccccaccgcaggccccgcccccgccgtactgtccgcgtcctcctggccggggttaggcaccaggcggcagttgtcccgactgtcagggactccgtcattgtcgtcgtcgtcgtcgcaggcatcaccctggccatcgtggtctgagtcctcctgggcactgttaggcaccgtgggacagttgtcccgagagtcctgatgtccgtctccatccctagagtggataggtgggatccagagacaatgagctctccagagcgttttgtcaaaggctacccggacgcccaccccaggtggcctccttactggtcttgatcgctgtcacaagcatctcccacaaagtcgtggtccacatccgcctgcggagggcagcatgcgggggtccataatcagacagaggaaatcagaaagcctcccacccaacccagccgcacagccaaggtcctcctgaccccaaggaaacccccaccgcaggctgctcggaccgagaggtcatttctctggcagtgtaaaatgctctaagctgggctgtgggctgggtaatccaacttgcagttcacccagagggcttacccagctggagtctggcctgccctcacctgatccgggttgctcttctggggacagttgtcacaggcatcccctataccatcgccatcactgtccttctggtctgagttgggtaccctagggcagttgtcggcctggttgcggatccctgcagaaatccacgggaccagagccccaagattgggaccaggccagaatgacttcattaggatgaggccagcctgaggctggcctggaacagagtcccaacttcatggaagctttttttttttttttttttttttttttttgagacagtctcattgtgtcactcaggctggagtgcagtggcatgatctcggctcactgcaacttccacctcccgggttcaaatgattctcctgcctcagcctcccgagtagctgggattacaggtgtgcgccaccacgcccagcaaatttttgtatttttagtacagacggagtttcaccatgttggtcagtctggtctcgaactcctgacctcgtgatccacctgcctcagcttcccaaagttctggaattataggcatgagccaccccgtccggcccacaggaactttaagaatgaatggtcccatccaagggaaggctagtgagggggacgggctctcactcccagggtggctcagctgggtgcccgtgtgtgccaccctgagcccctatgtccccatctgtaaagttgtcacctcccaggtcctaaaccccaggctcgaatctcttgtcctcttaattcctgcctgcggcattgacacagggaccaccttcccttccaaatatccctgcgtttttcctggccttgcagcccagcttgcatttttctggcgccccaccatggtctttggtccagggcgccctagtccagcttaccccatccggcttccaaaaccagccaagccccgccccggagccgaatcccgcccttcggtgcccgccgcctctcctcgccccccaacccccatcgagctcacggtcgccgtcgatgtcgtcgtcgcacgcatcgccccggccgtcctggtctgtgtccttttggtcgtcgttcttctgggaccggcagttgtcgcacgcatcgccccacttgtcctcgtccgtgttgcgctggtctgggttccgcaccagcgggcagttgtcctggatgacagggtgggttaagggtgagatcaggtcgagaaggcaaaggtcacactcctcagattcccaaatctccgaggacgcgtctcctcctcaaggaacctttcgcccctcctagaccacggaggccacgcccctcatccaagccacgccccatcccacttccctaggccccgctcacagctctgtcttttcttttttctttttctttttctctttctttctttctttctttctttctttctttctttctttctttctttcttttttttgagacagagtcttgctctgtcgctaggctggagtgcagtggcgcgatctcggctgactgcaacctccgcctcccgggttcaagcgattctcctgcctcagcctcctgagtagctgggattacaggcgtgcaccaccacgccccgctaatttttgtatttttagtagaggaggggtttcaccatgatggccaggatggtctccatctcttgacctcgtgatccgcccgcctcggcctcccaaagtgctgggattacaggagtgaaccaccgtgccgagccgtagatctaccttttcattggggaccccgtccccgtcggcatccggatcgcaggcgtctccgatgccatcgcggtccacatcctcctgccctgagttgggcacagtcacgcagttgtcctgggggcgggcacagaaggtgtgaggggcgcggtcatgaagtcccgccctccctcctgcccaagcccgccccgctccgcccccacccaccttacggcactggcgctccgggcagcgcagcttctcgtccgggaagccgtctaggtcagtgtcgcgaccacagaggatcccgttgccggcccagccaacggcacactgtgggagagtgtaagtgggtgccctggagtggccgccacccaaccccgcctcaagcccagcccgcccgcactcaccacgcacgaccgcgagccatcgcgctctaggacgcagtctgcatgctcgtggcactcgctgggcgagccgtcggggcagaagcgctgtgcgcgccgctggcagccggacgcctggtcgcccacgaagccgggctggcacgggccgcactggaaggagccctgcgccggagccgccggaggtcagcgcaggccgcccgccgctcgccccacctcccgcgatcctttcttcctccccagcgggccttacccgggtgttgatgcacacggagttggggacgcagttatgttgcccggtctcacactcgttgatgtccgtgcaaacctaggggaggggaactcagaggtcaccaccccacgcagacacctccggacctcccacctcctccacacttcctccgcatcctgcctctcccctccatcctgccccaaaccgatcagccctggcgcagcggacccctcctctccccacccctcccgctggaaggaggctggaagaggagtttactggtaaacaaaatggacgcccccttcccttctgctccaaaaatggggcccccacacctctcacctgcttgttggccttggcgaaagccagccccacgccctggtgggtggggccgctgtaccccggcgggcaagcctcgcagcggaaccccgggctggtgttgatacagcggactcgggggaagcaggggtgggcgttgcactgggggaggaggggccacagagggtcagagggcttcgagctgggccctgggggccgcacctcgtagtgtctcggatgtggaaagttcaagggccatatgccagtgcttggagctctgagatggaagcaattgtcgcaggggtcaggcacgactttgccttgatgacggcaagggcgcaaccgggagaggagaggagagctgttccctcatgggcgaggggaggaaggatgagggcgggcatccccagcagaggggggcaggggtcgtcggggcgtgcgtgcccggcggtggcggggggtctgggcgtgcgttccctggctgtggaagggtcgttgggactggcgatcccctgcggcgaggagggtagctggggcggaccacccctggcggtgagggagtcgtcggggcgggcgtcactagctatgtagggggttgtgggggcgggcgtcccgggtggtgacggggatggtccttgggttgggcgtccccccgcggtaaggaggtagtctggccgtgcgcccccggaggtgagaggctcttcggggcgaacactcccagtggaggaaggggtctcccgggcggcgagagattggggggcggtagagggagtcgtcagggcggtggagtgtcggggctagcgcacctcgttgacgtcggtgcagtgcgagccgttgcccgtgaagcccgcggggcaggggccgcagcgcgcgccgctctccgtctggatgcaggccacgccggggaagcagaagccgggcgcgcagtggagcaggggccgcacgctgggtaggccggtgcgtactgactgctgcatccctgcgggggggaggggggagaagcggcggggctgatcggtggctcgcccgggggcagagcctatcatggccacgccccggggctggaggcttccccttcccccccaccccccgccccggggcggcccgaaatcctgcgctgtccgcgatcccgccccagaggctgcgcgctctgaccgcggggtctccccggtctcttctctgagtctctgtcccgcttttctgccccgtggcgtctctcacttccccaaaactctctcaccgcttctgtctctttttgtctctgtttctacacaccccatcccattcccgttcgtccgtccacctctccgtcagcctccatctccttccgtctcttttcctccccagctttccctggctctctgtctctgtctctgtgtctctgtctcccgtctcttctctctcccgaccgccccgccgcgctcaccgcacgcgtcacactccatcaccgtgtttttcaggaacgtgatctccctgacctgcaggggtgggatggaatcagcggggtcccaacctctcctcatccctcgggtctcccctctctctaccccggggtccctttctacagcctcttttcgccaaggactccctacccgccgacccccttccctccccatctcctctccaccttctcgggtacttcctctctcctcgctgggaactgagacccccttccgttccctggcactccctgccccgcacccgggccccgcacctgctgccgcagcagctcccgcacgtcctgcagcgccgcgttggtttcctgcagttcccgaagcatctgcgggcccaggtctgagcctgcggcggcaggggacctggtgaggcgtcatggggccggggaatcccaccaccaactcccaccgttgcagcgaacccggacctccgaggccccactgcgctcctctagtctcggtcccgccacctgctttctgcgcccggcacgtcccctacgaacagtccgtgagccccaaacagcctggatcccgggcctctcacgggtcctacagtccgttgtggggccgtgggcacggcgcgggtgctaacgcggcttacccaacgggctctggccctgtccggacgcgccgagggcagccagggtgagcagaagaacgcaggcggtgtcggggaccatggcggtggcggggagctgggtggctgctcgctttctaccgcccacgaggcccgcggggcctatttatccccaaggcacggccggccccagggacggcccaccacagccctgcccaacgtccagcctcaaggtaaacagatggcgctggcccctgcgttcaagtccccgcccggaatgccccgcgaagtcgcccgcggctgaatccgacatggtggggaaactgagtcccggggtctgtggagagagctggtggggcagggagtcagggggtactgcccccactttcattcactgtgtgtgtgcgtctgtgtgtgtgtgtgtgtgtgtgtgtgacggggtgtggctgtatcgcatcctcttgcttcagtctcccatgtagctgggactacaagcccgcaccaccaagtccagctaatttatttttatttttatttttatttttagagaccgggtctggctatgtcctgcaggctagtagtctcaaactcccggcctcaagcgatactccccacataactgggattacaggatccagccatagcattcagctcattgattgattgattgattgagtgcttgctgtatgccaaacctgagttccagttccaaacaaggcaggctccatggccacgctctcagctcacacttcgggaaacagagtcaccagcgtctgaaaaaataggtccacccactatggatcagactgactggccctccactcctcctgaagtgcttcaaaactgggtaagttgctgggtgcggtggctcacacctgtaatcccagcactttgggaagccaaggcgggcagatcacctgaggtcaggagtttgagaccagcctggctaacatggtgaaaccccatctctactaaaagtacaaaaattacccaggcgtaattcctcccttgcacaatggaggtaataagttaataattattaattaatgattaatagtaatgatgattatgatgatgaatggaaaataggggaggggcagttgagacctgggactctcaattttcctgcctctgtccaaggaggccgcttctggccccaacgctggagggctgcaaatgactccccccaacccaactcattgctggtgttccctcccctccccatggtccctcggctggtggaggaggggacagcgttcaggatcttgccccaacccctgtccaaggggacaggcccacttggttttccaatctgcgcaatggggtgtgaggcccccatctggaggggagcaagttaaagggctctagcaaggggaggtccggggcttctgtttgtccaggctgtgccataccttccaaactgtgctccagctgctgtgggaacagcctgtaataaaaataaaagttaccgctaactggccagccacactctggagttacaaaaccccttaacctcctgcaatcagttaacactctccactcccaccttccagtactcacagcgtctattctatagacagagaaactgaggcccagagagaaaaagtgactggcctaaggccactgcccgagggcaggggtgaatctagactcagagccagatatgttttctggggagcctacagagaagtcaccgagggcttcctggaggaggtagcaaggagacagacataaaagaaaaggaggacttggatcagcagagggaaaaggtgagggcagttttggtggagggaagcatgtgaagcttggaggtggggacatttctagacacaataattatttcacaaacatcaaggactgttgtgtgtcatgtctcctgtgctgggtgatgggcacacagggtgaagaagccagacccagtctctccttcaaatggggagcccagtgggctcatggctgtgacgggacacacagacaatggtaggagtccccaggaaattgatctgtttgaaaggggatgggtcagggcgggcttctggaggaggagggaccaccaagctgaggaccggatgatgaggaggacacagccaggcagaggtagcagaaagtcattccaggtagaggaaacagcataggcaaaggccctgaggcaggaaccaacctggcccgttggatggactgacctcaaggtgacaagctcttggggctcagtgagaagcaggagatgaggctgtgtgtgaaagggcagtgctggtggtgtggggctccagtggtctcccgagggtaatggggagccacagagagtgcgtgaagagagacaggcctataagtggagtgttggtggaagcagctggtcccagccagagcatttccaatgaagcctgtcctcaatagtgcctgccctgcctgctgcctacattggggccatgagctcacctcctgttttccttggccttcagcacacctgggggccgctcctggcagcactggaattctcgggaaaaccacagctccagtggggcctgggggctggcatatgctgcacacagctaggacaggagcacatggaagccaggcccctgccacaggctggtcacagtgctggggcttggacacacgtggccttatccatggctgggccacggggagttgcagggaagggcattccaggcggagggaactacaaaggtggagttcctgagggtgtcccaagatcggacaacagaggcccggaaaggggatgtctggggtcacactcctgcctcctggatctcgccagccctgaaatcccccttctaggcagcagtcccctcctcctgtgcacaccacacttgcctcagattacagaataactcactgtaggtgtcattctgggcctttgtacctgctgttccccccacctcgtacaaactcctccatccttcaaggtccagctataatgtcccctcctccaggaagccttccctgctgatattctccagataaccttccagcctagccatgatcctcgggactgtgagtgtctgtggtttgctctgtccctccgagcctgaggggctcccacccaggggcctggactggtgtagaaaggttaggctggagggcttggtgagccgggacagcatccctatgattcgtgttcattactattttttttttttttttttgagatggagtctcacttttgtcgcccagctggagtgcgatggtgcaatctcggctcactgcaacctctgcctcctgagttcaagtgattcccctgcttcagcctcctgagtagctgggattactggcacctgccaccacgcccagctaatttttttatatttttagtagagacggggtttcaccatgttggccaggttggtctcgaacttctgacctcaggtgatccacctgcctcagcctcccaaagtgctgggattacaggcgtgagccaccgcgcctggccattactactttttataattaatgtaatgtcattactatttttttttttttttaaaatagagatgggggtcttattatgttgcccaggctagtctcgaactcctgggctcaacagatcctccttcctcggcctctcaaaaccctgggatttcagccactgcacccagccaacattatcatatgaatcctagtaacccctgccacctctgtacttgatatggcagggaagggggccacacagcctgggttcaaatattggtgagcatggccttactgtgtgacctaggacaagtcacttaacctctctgtgcttcagttttctcacccataaaatgaggatgatcactgttgagaggattgaatgagctgacccatggaaatccttcagcccagcgcccagctccagcgctactagcgtgcttattccatatgaaatttatacaccgtgggccagtgtggtggctcacacctataatcccagcactttgggaggccacagcaggtggatcacctgaggccaggagttcgagaccagtgtggccaacgtgaaactccatctctactcaaaatacaaaaattagctggacgtggtggcgcgtgcctgtaatcccagctaatcgggaggctgaggcaggagaatcacttgaaccggggaggcagaggttgcagtgagccgagatcacatcactgcactccagcctgggcgaccgagtgagaccttgtctcaaaaaaacaaaacaaaacaaaaaaacttataccctgtgcctgtcgcttatacctcagatcgttcttatttctatcttactcagagaggagaagagacagtctgaggtcacacagccagaattagaactgaggcatgcaagaccctcaagcccttcatacccgccctctctgtccttgccacagaaacagaatccagcatttcgctggcccgagcccctcattaactgggatgtcttctcggcccaggacctcctggccagagcatctggccggcgccccagccagccccacaccaggccccgtggttccaggagcccggccaggctggggaagagggacgggtgcctgcatgatggggccccggggcccttcctggcagacgtctgctcagccaggagacgtgtgggcgccccggctccctgcctcccgcccccaccgttgcctgcctttgtgaatgcagaaggaaagtatgttgtgaaggcagccgccctgccctgggcgggccgggctgtaggcccccagtctgcggaattcatcagggcggcaggggagggcagcttggcgacctctgcatcctcagcctgccttgaactgggagagacgtactggaggcatctctctagaaggaacaaaaggcaggggtgggatggggggctctgagctttgaagtccaggagacgccccccgactggccgtgtgacctttggcaggtgccacctcctctcccagtctccttttttttttttttttttttgaaacagggtcttgctctgttgcctggcctgaagtacagtgacaatcatagctcactcattgcagcctccaacttctgggctcaagtgatcctcccacctcagcctcccaaagtgctgggatcacagatgtgcaccactgcacccagccccattctccttttactcagtccctacccccattgcatcccaggctctactggatggcgataaaggaagaagacaacaataaatacagtggctacagttttcttgagcaagtgccaaatgcttgaaaccttaccactcagcctttgtgggttttctctttctgtcatcccttaagtcccagaaggcaggaatttgtcatcatgggagacagtggggcacagtgatgaaggtctcagtctctggcatcagagcctgagtttcatatcccagctctgctgtggtacatgaggcaagttgcttaacctctctgtgcctcagtttcttcttttttcctttatttcttcttcttttttttgccaccttcgaaagtttcttataatgtaaaattttacttctcaggttactatactgaagagttgcttcaggagagaaagaatttcaccagaggccgggcgtggtggctcacgtctgtaatcccagcactttgggaggccaaggagggcggatgacctgaggtcaggagttcaagaccagcctggccaacatggtgaaaccctgtctgtacaaaagtacaaaaattagccgggcatgatggcaggtgtctgtaatcccagctacttacttaggaggctgaggcgggagaattgcttgaactcaggaggcggaggttgcagtgacccgagactgcaccattgcactccagcctgggcgacagagtaagactctgtgtcaaaaaaaaaaaaaaaaaaaaaaaaaaaaaaaaaattcactaggaacagataggaatttcacaatattcaattgatactggtttctttcttttttctcttttccttccttccttccttcccttcctccttcctccctccccctctcccttccttcttccctcctccctgtctctctctcttcctctctgtctccatttctttcttgtttttgaggtaggttcccgctctgtcaccccagctggaccgcagtggtacaaacacagctcactgtagctcaaactcttgggctcaagccgtcctcacacctcagcctcctgattagctggggccaaaggcatgtgccaccacacctggctaattttttttattttgtagagacagggtcttgctctgttgcccaggctgctctctaactcctgggctccagtgtcccttccatcttagcctccagggtagctggaattacaggcataacacctatatttaatgaaggtttcatgcagtcaaataaactagtgtctgtgttctgaggggaggagagtgccttcagggctaactgtagaagctttgttctctccttcagtctctctgtctaatgaagtgaaaatggaaatgtgtaaagttttacgcaaggtaacggtagcaggaaaaaccaaggtgaatataagtatgagaagaatcctgacctcttagcgtcagtgtaagaattgaatgaattagcgcccagaaagttcacagcccttgcttgggaggcggaagtgggaggatcgcttgaacctaggagttcaaaaccagcctgggcaatatagcaagaccctgtctctaaaacaaaacaaacaaacaaaaaaaaaatttaaaattagccaggcatggtggtatgtgcctgtagtcccagctactcaggaggctaaggtgggaggatggcttgagcccagaagtttgaagctgtaatgagctatgattgtaccactgtaccccagcctgggtaacagagtaagacctcgtctcaagaaaaagaaaggcccaggcgtggtggctcacgcctgtcatcccaccccagcctgggtaacagagtaagaccctgtctcaagaaaaggaaaggcccaggcgtggtggctcaagcctgtcatcccagcactttgggaggctgaggcaggtggatcacttgaggtcaggagttagagaccagcctaagcaacatggtgaaaccccatctctactgaaaatacaaaaattagccaggcatggtggtgcatgcctataatcccagctactcaggaggctgaggcacgagcgttgcctgagcccaggaggcagaggctgcactgagctgagatcatgccactctcactccagcctggggtgacagagtaagacagagtaagactctgtctcaaaaaaaaaagaaaaaaaaaaaaggaaaagaaagagctgagccctcaatcaatgtcagctattaacatccccattttacaggttggcaaactgaggctcagcaagtctgtcctgtctcctcaatttggtcactggatgctcagagtgggaagtcacctcctaccgctgcctaaggctccaggagagagtctcccaaccaggcttctgcagttcccgctggagaaggtagggtgggctgtcagcagagaaagtggagagtgcagggaccagagcactactgcagttcctcagtacccctcgtgcccctcccagcccctacctgggctcattaacaggaggcccttgttcaggggagtgatggatggcgtgggaggccgagggcggggtgtgtttacccaccggcggctgcagacaggagcccaggccagggccgggccagtaggggagggaggctcccaggtagggaggagcccagccccaatactgctgcacggaaaggggccagctgggccccttctggaaacagaggccaagggtcagggaggccattctgctggggaaattggtgccgagagttgaacaagtgaacaggtgccagcagagcagagccccaggcagagggcacagcaggggcaaaggcccagaggtgggtatgtgcttgatgtgttggaggttccgcgaggcgtcaggagtggctgcagcaagcggggaggggaaatggaggaaatcttccggctgtgagccatgtttaggctccatgggcgtgtccattcccacatctttctgcacgccaggcccttacctgggctgtgaccgctccctggtgccctgtctgctttcacatggctcattcctcaccccggctggcttagaggctcccgctggccttcacaggcccttggtgtgctccatcagagctgtgaccatgctgtatgggcactgccaggttacacgggtcatggggctgcctcctccatcagactgagctccaccatcttgttcccctctgtgttccctgcatatacacatgatggaatactccaataatggatggacagatggatgtataagtggatggatggatgagtggatggatggatggataagtggatggatggatggatggataaatgagtggatggatggatggataagtggatggatggatggatggatggataaatgaatggatgtatggaggatggatggataagtggatggatggatggatggatggatggataagtgcatggatggatggatgggtaagtggatggatggatgggtaagtggatggatgaatggatggacaagtggatggatggatggatggatggatggatggataaatggatggatggatgaatggataagtggatggatggatggatggatggataggcaaatggataaataagtgaatggattgattaatggatggatggatgatgtataagtggatggatagatggatggataagtggatggctggatagacagatggataggtggatgggtgcaaagataatgaattgatgaatagatggatgaatgatgtataagtgaatggatggataggtagatggatgggtgaatggatggatggataagtgaatggatggataaatgaatggataaggagatatattgtatggatgaatgaataagtgaataaataatggataaatggatacatttatacatgtggatggataatgtataaatggatggataaacagatgaatggatgcataagtggatgtataaatgaatgaatgaatgggtggatggatagataagtgggtatatagatgaataagtggatggatggatgagtaagtggataaatggatggatggataggtggataggcagctgaatggatggatgatgtagaagtggatggatggatggatggatggatggatggacagataagtagatggatggatagataagtggatggatggataagtggatgaatgggtggatggatagatggatggatggatgatggagtaaagaaaagctacaagaccacaaaacaaggatccacaggactaagaaatgacagaatcacatcactggttaatggagcaactgaactgtggagtcctagggccacgggaccacagagttagagatccacgcagtccagtcaacagaagcacagaaccgaagggtagttggaagctataggaccccagtgggggcagagacaagccattggggcatcccacatccacggtgccaccaggatagagtctcagagttgaccccaacagaaccaccctctggccacaccctcacctctcagctctccaaggagcctcccaggggccactgaagccacagggtgctttttcccccaatctgtggagcagccttgggggacaggaccatgccatcgccaatgcctgcagccagtcagcctccaaacactcagtgagtcccggcaccagggccaagtgaggctgtccaagtaccaggaaacactgccagcctctggccaggctcctctggacgccgagtgctctgcagccaggggcaaaggaatcaacgggtaacgtttacatccatgtcccttccaaagccagcagcaacatagcatggaggggaggccgtgccccagctgcgtcccctccgggccacggtgcactgactagctgcccgctccatcgccaggagtcacagctcagctcgaatttctcgacacatccacgtattaatgagctctcccaagacagcacccgtttgcccagcagaacttgcacctgatgcccagaacaaccagcccatttgagatgggggaaactgaggcccttgtctcagaggtgagcccaggaacacagcaggctggagctgagtctcaatcccaagcctgcaggatgctaaacctgaacttatcatcacccagttgggctgcctctcaggccccagccccttgtcctgggacccccccacttccccaccaggtgtttgcttccaaatgtggtgcattgcagaatgccaagagcacgggctgcagcagtttcttcccttccatgggctcagaatatctagctcacagggctgtggtggagaaaaactgtggtcatagcacagaaaggggacctgattgctggcctgataggagccttgcccacaccgtttccccctcccttcttcttcttcttctttttcttcttcttcttcttcttctttttttttttttttttgagatggagtctctctctgttgcccaagctggagtgcagtggcatgatctcagctcactgcaacctctgcctctgggttcaagagattctcctgcctcagcctcccaagtagctgggactacaggcatgagccaccgtggctggctaatttgtgtatttttagtagagacatggttttgccatgttggccaggctggtctcgaactcctgatctcaggtaatccgcccacctcagccttccaaagtggtgggattacaggcctgagccaccgccactagcctttttttttttttttccgctaggtttcgcttgtgtgattacctcattccatcttacatatgaaaaagtagaaggcaagagagtgaggttctaatcctcccgatacccaccctggcagcttcagggagggtttctcgcatctgcagtgtagtaaaaacatggcattgctgggcaccgtggctcacacctgtaatcccagcactttgggaggctgaagcgggaggatctcctgagcccagcagttccagactggcctgggcaacatattgagacctcatctctacaaacaagcaacaacaacaaaaaggctggagtgcggtggcacaatctcagctcactgcaacctccacctccccgctcaagtgattcacttgcctcagcctcccttgtagctgggattacaggttcttgccaccacagcaggctaatttctgtatttttagtagagacggggtttcaccatgttgcccaggccggtcttgaatttcagacctcaggtgatccgcctgcctcggcctcccaaagcgctcggattccaggcgtgagccactgcccggtctgcctgccctttctgaatagcaaggatggacccctgaagtgccaggctgaaattccgccagctcactgagtggggaaacaccctctccctgacgaactcagcaaagatctcaaggctaactctcataggctcagccctgaaccaatcactgcagtcggtgggtggagggctttgattggctgggccaggagcctgagtcccctctggaggttggaggggcaggggccaaaggaggatggtgtcagtaactcgtggtgcaggcaaacttgatggaaactgaatccccacccagactcttgccttagtgggtctctggcaccacgggctactctgagtggctttttctgggggtagggggagggacggaatctcgctctgtcctccaggctggagtgcggtggcgcaatctcggctcgttgcaacctcggcctcacgggttcaagcattctcctgcctcagcctcccaagtagctgggattacaggcgcccactacaacaccctaatttttgtatttttagtagagatggggtttcaccatgttggccaggctggtctcaaactccttacttcagatgatccgccctcctcggcctcccaaaatgttgggattacaggtgtgagccaccgtgcctggcctgagtagctttaacggggtgaccctggccatgtgccaagccccatcccctgtctctacctccggctgctgtatttgaggccccttcttactgccctctgcttgcaggaaggtgggttcttccttactctgctggcctcccgacctcccctgggtaccaagccaccttaagcatcacaaggaaacaggcattacctggaagagtccccaccaccagtttctttccaaattgctgctggtgggccaaggtgcggaggctcatgcctgtaatcccatcactttgggaggccaaggtgggtgtatcacctgaggtcaggagttcgagaccagcctggccaacttggtgaaaccccgtctctactaaaactacaaaaattagcggggcgtggtggtgcctgcctataatcccagctactcagggggctgaggtgggaggatcacctgagcctggggaggcagaggttgcagtgagctatgatcgtgccactgtactccagcctgggtggcagagtgagatcctgtcacaaaaacaacagcaacaacaacaacaaaaattaaggaagggaattccaggcagagaggtgagcttgtgcaaaggccctggggtaggaagtaattttcttgttggaggaggtgaggaggccgatgtgactggagcagagtgagggaggaggggggagatgggttagagagatgggccaaggtgggatcacatgggggccttgcaagctgcagcaaggaggtgggttttattctgagagcaatagggagccatggagagtgtgtgagcaggggaggaacatgatttatgattttaagccatctcttgtggctgcaatggggaagaggccaggcaatgtcaaggcaagagctggtggggccagggccagggcacggccacagggtggggaggagaggttagatttgtttgttttgaagcctgagaggactagagctactgatgagcttgggaaggaagggagggaggagtctcagacgcgcccagatcttgaacccatcacaaggtggttggtagggttgttgcccgacacaggaagacttagcagaaaaccatgaaccccaccttggccatgttgttgctgaggtgtctggtctgggctggccaggctccagatggaaccgtggaccttgtgggcaaagagtggcctgtgacttccaggcctgggctgtgtgcgttgcagggagatgggcaggggtctctggctgcgtccttgatccccatcctttgtgcaaacaggtggggtggggcagggggaacccatgttttccccatcccgggtccttttgttccagttggaagccacgaccaattcgaaaagtccagatgtggagttggacgcaacccttggaccgtgcggtctggggaggccagtggcccgtcatccaacaggtcaggcctccatgtggcctcgctggctgtggcccggctggggctggggggcagaacggctttgatttcgagtctctggctgaatctgcaaaggttaaaaaaataatcaccagcaccaaggcgttgccccttcaagacgtcaatcccaacaccaggcggaaaaaacaggccctggggcccctgccagcccacaggcctgagacctgcagaggggcctgatcagaaggccaaaaagctgggtccccacatctctccgggcacaaggggagactcggcttcccgtctggaacacagggcattgctgtagaagcgcatccacgttcaaggtcaagtgcagcatctacctgcctgccaagccctggcccaggcagtggggacccatgaggcgagtcaaggttggccccggtctgtagggctcccaggccagagatggggtttccccatgctggtcatgctggtcttgaactcctgacctcaagtgatccacccacctttgcctcccaagtgctgggattatgggtgtgagccattgcgcccagccccttccttcatatttacataaaatacccttctgtgacccaggacttggcttaaatgtcaacacctcaggagacctttcccaacccatgggcaaaaatacctacacccaggtatttctttcagacacttctcactcttggaaatgatcttctcggctacattttcatgaggttgggaacgtggtttatccgcagtttgtgccattgtacctggcatatactaggtgagattgtctccttggggacaaaggaggatgctggctatcacaacaaagtttcacaaacatataccctctgagacccccagacctcccccagcagtgccccaggatttacaaccagaactttatttatttatttatttatgagctggagtctcgctctgtcgcccaggctgaagtgcagtggtgcaatcccggctcactgcagcctcgaccccctgggcttgggtgatctttccacctcagcctctcaagtagctgggaccataggcacatatcaccctgtccagctaatttttatattttgtagagacaaggtcttgctgtgttgcccaggctggtctcaaactcctgggctcaagtgatccaaccaccttggcctctctaagtgctaggattacaggtgtgaggtaccacacctggcctacaacccagaaatttgccctcaataaatggcagagtgaggctggtcacagtggcacacatctgtaatcccagcattttgggaggccatggtgggaggatcacttaagaccagaagttcaagaccagcctgggcaacatggtgaaacccccatctctactaaaatacaaaagaaattagccaggtgtggcggtgtgtgcctgtagtaccagctactcgggagactgaggcaggagaatttcttgaacctgggaggcaaagattgcagtgagctgagattgcaccactgcactccagcctgggcgacagagcaagactccttctctaaaaaaaaaaaaaaaaaaaaaaaaaaaaaaaaaatagggccgggcgcgatggctcacgcctgtaatcccagcactttgggaggccaaggtgggcagatcacaaggtcaggagatcaagaccctcctggctaacatggtgaaaccccgtctctactaaaaatacaaaaaaattagccgggcgtggtggcaggtgcctgtagtcccagctacttaggaggctgaggcaggagaatggcgtgaacctgggaggcggagcttgcaataagcagagattgtgccactgcactccagcctgggcgacagagcaagactccatttcaaaataaatacataaatacataaataaataataggcaggcacagtgactcatgcctataatcccagcactttgggagtgccgtggtaggaggatcacttgagaccaggagttcaaggccagcctggataacattatgagacctcacctcttttttttttttttttttttgagacaaagtctccctctgttgcccaggctggaatgcaatggcgtggtcttggctcattgcaacctctgccgcctgggttcaatcgattctcctgcctcagcctcctgagtagctgggattacaggtgcgcaccatgacgcccaggtaacttttgtatttttagtagagacggggtttcaccatgttagtcaggctggtctcgaactcctgacttcatgatctgcctgccttggcctcccaaagtgctgggattacaggcgtgagccacagcacccggccgagacctcatctcttaaaaaaaaattaggccaggcatggtagctcatgcttgtaatcccagcactttgggaggctgaggtggggctaaggtcaggagttcgtgaccagcctggccaatatggtgaaaccccgtttcggctgggcgcggtggctcatgcctgtaatcccagcacttgggaagacaaaggtgggtggatcacgaggtcaggagatcgagaccatcctgcccaacatgatgaaaccccgtctctactaaaaatgcaaaaattagctgggtgtggtggcacgttcctgtaatcccagctaatcaggaggatgaggcatgagaattgcttgaacccagcaagcggaggttgcagtgagccgagatcgcgccactgcactccagcctggtgacagagcgagactctgtctaaaaaaaaaaagaaaaaaagaaaagaaaccccgtttctactaagaatacaaaaattagctggatatggtagcaggcacctgtaatcccagctacttggaaggctgaggtaggagaattgcttgaactcaggaggcggaggttgcagtgagctgagattgcaccattgcactacagcctgggtgacagagcgagactccgtctcaaaaataaataaataaaattaaaaaacaataataaataaaataaataaatggcagagtggtttgagtcatgctggaggcgcacaggcagctatggagggtcagcaggagggactgctatgctgcgactgaaggagagatgagaattggcctggtaagaggccacagagggtgctcgggtggggggaccagcgtgtgtaaaggcttggaggcgacagagaacgatggagtgtttctggaactgtgtgtagaggggcccaactcacacagagtgaggggagaaagggccatactgctggaagggcccacaagccctgggacgatgggacttggactccatcccagggcaatggggagccatgggaggtatgtgagcagaaggcacatcagacctgtaccccctcgtcctgtgccaggtaccgagaggctccctcccagacctgggaaccccatgggctcaacatgcatggtagacacatctcaaagcagttttatgtgaattcctgaggagagctgtctccaacaggccaggccacccgctatcctcaccaccacggggctggggaggtctgtcgtccacaggagcctcccagacccagataatgcgctgacagctgcctggccctgcctgggcctcgaggcctccccccagcatggctgggttcccccgaggcccgggtctgactaccccttcccggcctgactaccccttcctggccctcggtggatgctgaagacatttcttcttattccgctggaattttcctcgtggaccatgccagcgcctccagaaacacatgaaaggaaaatgtttccagtctgagcagggctgttttattgctctccgggctgggagtctgaccacagagtggaaagggctcgtcataccactgttcctcctgctgaagcggctcggacccggcccgccctgccatgccctccttggaggcccgggttctgcagggtttttttttttttccttttttttgagagagggtcttgcgctgtcacccaggctgaacaggctggggtgcagtggtgcgatctcggctcactgcagcctccacctcctaggctcaagcgaccctcctgcctcagcctcctgagtagcagggactacagtctcttgccaccatgcctggctaactttccaaaactttttgtagagatgggatctccctatgttgcccagtttggtcttggactcctgggctcatgtgatcctcctgcctcggcctcccaaagtgctaggatgacaggcatgaggcattgctcctggcctctgcagggtttttccagctaaggaaagtttcccctgcccttgtccccctgaccagggagcaactccctcaaaaaatagaggttgggggccgggcacactggctcatgcctgtaatcccagcactttgggaggctgaggtgaatggatcacctaaggtcaggagttcgagaccaggctggccaacatgatgaaaccccgtctctactaaaaatacaaaaattagcctggtatgctggcacatgcctataatcccagctactcaggaggctgaggcacaagaatctcttgaacctgggaggcggaggttacagcgagctgagatctcaccactgcactccagcctgggtgacagagtaagactctgtctcaaaaaagaaaagaaagaaaatagaaaagaaaagaggaaaggaaaaagaaaaatagaggttgggagctcaaccttggagctgatgcgtttttccatcgtttattcattcaacagtctacttttttcccagagtgtgcccatttctgcatcgggtgctggggcgcaaatgggaacaaggaggatctgtcactattctttgggagctcgtggaaaggtggaagggggggcttcatgtgaccccattcccagagctgaacatggaggcttggggggaagctgcttgcctgagatggtgcaagggaataagtgacagggtcagaacgcaacacacagagtggctccaaaaccggttttctggtgtggtggcccgtgcctgtaatcccagccactcaggaggctgaggcaggagaactgcttgacccctggaagctgcactctagcctgggcaacagagtgagactcagtctcaaaaaatatataaaataaaataaaataaagtgcacaattccctggcattcagtgcacacaccatgttgtgcaatcactacctcgatctacttccagactatttcgtcaccccgtaaagacgctccgttcccatcagcggtcactcccccttcctctccccaggccctggcaaccacaaatctgctttctgtctctgtggatttgccagttctggccatttcctacaaatggaatcacacactatgtgacatttcgtgtctggcatctttcacttggcatgtgtttttggggttcgtccatgctgtagcagggagcagtgcatccttcctcttttgttttgtttttgttttgtacttcattcctttttgtggctgaatcatattccattgcatagatggaccacattttgtttatccattcgtctgttgagggacatttggatcatttctactttttggttatttaatttccttttatttatttattttatttttgagacagagtctcactctgtcgcccaggctggagtgcagtggcgtgatctcggctcattgcaacctccgcctcctgggtttcagagattcttctgcctcagcctcctgagtagctgagactacaagtgcgtgccaccacaccccagtaatttttgtattgttttgtgtttttttttttcctttttgagatggagtctcactctgtcacccaggctggagtacagtggcacagtctcggctcactgcaacctccgcctcccaggttccagcgattatcctgcctcagcctcccaagtagctgggactacaggtgcatgccaccacgcccggttaatttttgtattttttagtagagatgggatttcaccatattggccaggctggtctcaatctcctgacctcatgatccatctgcctcagcctcccaaagtgctgggattacaggcatgagccaccacgtccggccctaatttttgtatttttaatagagacagggcttcaccatgttggccaggctggtctcgaactcctgacctcaagtgatctgccaaccttggtcttcccaagtgctgggattacaggcgtgagccaccgagtccagcctttttttaggggacagcagggtaactctccgtcacccagactggagtgcagtggcgtgatcatggctcatggcagcttcaacatcctgagctcaaatgatcctcctgcctcggcccccaaaatagttgggactacaggttcatgccactatgcctggcttattttttctttttctttttattatttatttattttttgagatggagtttcgctctgtcacctaggctggagtgcaatggtgcgatctcagctcaccaaaatctccgcctcccgggttcaagtgattctcctgcctcagcctcccgaggagcggggattacaggcatgtgccaccatgcccggctaattttgtattttcagtagagacggggtttctccacgttggtcaggctggtctcaaactcccaacctcaggcgatctgcccgcctcagcctcccaaagtgttgggattacaggcgtgagccatcacgcctacttcctttctcacaattttaaacagtgctgttattggcctggcaccgtggctcatgcctataatcccagcactttgggaggccaagatgggtggatctctttgagctcaggagtttgagaccagcctgggcaacacggtgaaactctgtttctataaaacataacaaacaaacaaacaaacaaacaaaattagtccggcttggtggctcatgcctgtagtcccagctactcaggaggctgagtagctctgtcgcccaggctggagtgaaatggtgtgatctcagctcaccgcaacctctgcctcccagattcaagcgattctcctgcctcagcctcctgagtagctgggattacaggggcccaccactacgcccagctaattttttgtatttttagtagagacagcatttcaccatgttggccagggtgaccttgaacttctgacctcaggtgatctgccagcctcagcctcccaaaatactgggattacaaacatgagccactgtgcctggcctagacctcatatttttaaaagcagctagtcagggttttttagagaaatagaagcaattggataggcatgtattgatagaaaaagatttattgtgagggattggctcacacacttatggaggctgagaagtcctactatctgctggctgcaaactgtggacccaggaagccagtgatgtctttttttttgtttttttgtttttgtttttctttctttctttttgagatggagtctcactctggcccaggctggagtacaatgacgcaatctcagctcactgcaacctccacctcccaggttcaagtgattctcctgcctcagcctcctgagtagctgagattacaggtgcgcaccaaccatgctccgttaatttttgtattttttagtagagatggggtttcaccatattggccaggcaggtctcgaactcctgacctcatgatgcacctgcctcggcctcccaaagtgctgggattacaggcgtgagccactgtgcctggcctcgttgtttttcttgagatagagtctcactctgtcacactggctggcgtgtagtagcacaatcttggctcaccgcaactttcacctctcgagttcaagcgattgtcctgcctcagcctcccgagtagctgagattacaggcacgcaccaccacatcccactaatttttgcatttttttgtagagatgggttttcgccatgttgcctaggcaggtcttgaccgcctgggctcaagcgatcctcctgcttcgaacttgcaaagagttgggattacaggtgagagccagaacatctctcgtttgatcttgtcaccttctaacacatgacaccagtttcttattcctgatggctttgttattgttcttctctctactagagtcggctacatgaggccacatggtcgtctgtgaattggggacagtgacacccacctcgatgtgtatatagggtgggggtccacagggcccacagggaagtgtatttggtttcccaccatcacaccttccaaaacagcctcggtagccggatgtggtggctcatgcctgtaatcccagcactttgggagactgaggcaggatgattatttgaggccagaagtttgagaccagcctgaacaacataacaagacccctgactctacaaaaaattaaaaaattagccaggtgtggtggcccatgcttgtagtcccatctactgaagaggctgaggtggaaggatcactttagcttgggaagtcaaggctgcagtgagctatgatcgcgccactgcacttcagcctgagtgacagagcgaaaccccgtctcaaacaagcaaaccaacaataataaaacagccacagtgaacttccatccaaaatatatcccaggctgggcgcggtggctcatgcctgtaatcccagcactttgggaggccaaggtgggcggatcacttggggccaggagtttgagaccagtctggtcaacatggtaaaacctcttctctactaaaaatacaaaaaattagctgggtgtagtggtgcacgcctgtaatccaagctactagagaggctggggcagaagaatcgcttgaaccccggaggtggaggttgcagtgagctgagaccgtgccactgcactccagcctgggagacagagcacaactctgtctcaaaacaaaaataaaaacaaaaacaaaaaacaaaatatatcccagcctgaagcctggctcgggaattccaaggggtctgcaggggctaccttcctctccagacactgtcagcaacctttaccaccctcaatagcagccttgagtctctgcagcaaccaaagctttgaggccaagccaaaacccacctccctgacacgctagcacatccccaaaaaagcaacctgtgatcgtagaatcaaggtggctgccggcttgcccccgccacctgaggtttacacagacccaccatccccttcaaagacactgttcaaagcaaggagagctctaacacagacacacacacacctatttttcttttcactaccagcatgcccgggtgtgcctgaggcttggctgtgtatccagatcccacaaggggctcctttgaaacaggaatggggccacagaggaggggcccacaggaacccgcaagcacccactgttcctagggaggagtgctgtacatggagggtcccgggtccacccgaactggccacacttctgcaagggcagccaccgcgagggccacgtctgtggaagctgggagctcaacaaaaagggtttcttttttttcctttttttgagatggagtctcactctgtcacccaggctggagtgtagtggcgtgatctcggctcactgcaacctccgtctccctggttcgagcgattctcctgcctcagcctcccgagtagctgggattccaggcacccaccaccacgcctggctaatttttgtattttttagtagagacgggatttcaccatgttgcccagactggtttcgaactcctgaccttcaagtgatctgcccgcctcagcctcccaaagtgctgggattataggcatgaaacaccgtgccctgccaacaaagtggattttaaagagacccaagtctgggctgggagaagccactgcaatatcctaaatatccttttcccaaagccgtggaatttctctgcagcggccagggccaacgcttaccctcgagggacctctcttggtatgaaggaaaaattccattttcctggacctggggaagctgatgtggaactcgaggaggggccagcctacgttgagagcagacacagggcacagggtaggttataaatttaggactccaggctcaggggcgtgaccaggctgatttaggtcttcaagcaggacagtgctagggatggcctcattcaatatttttttcttttctttttttttctgagatggagtcttgctctgttgcccaggctggagtgcagtggtgtgatctcggctcactgcaacctctaccacccgggttcaagcgattatcctacgtcagcctcccgagtagctgggactacaggtgagcgccactaggtctggctaattttttgtatttttagtagagacggggttttgctgggttggccaggctggtcttgaactgaactcaagtgatccgcccacctgggcctcccaaaatgctaggattacaggcatgagccacggtgcccagcctcattcatttttttttttttgagatgggatcttgctatattgcccaggctggtctagaattcctaggctgaagggatccttttgcctcagcttcctgagaacctgggactacaagtgcatgccaccatgcctggcaaggttggcctcattctgtctggaacccggcctagactgggcgagagagacacttgtgataaagacccatggagacttcaatttgtctgaaacttttaaaaagtttcaataatgagccgggtgcagtggcttatgcctgtaatcccagcactttgggaggccaaggcaggaggatcacttgaacccaggagtttgagacaagcctgggcaacatggtgagaccctgtctctataaaaaagtaaaaaaaattggccaagcacggtggctcacacctgtaatcccatcactttgggaggccgagacgggctggatacctgaggtcgggagttcaagactagcctgaccaacatggagaaaccccatctctactaaaaatacaaaattagccgggcgtggtggcgcatgcctgtaaccctagctacttgggaggctgaggcaggagaatcgcttgaactcaggaggaggaggttgcagtgagccaagatctcaccattgcactctagcctggactagagtgaaactctgtctcaaaaaaaaaaaaagtgaaaaatgtagccaggcatggtggcccgtgtctgtagtcccacctgcttgaaaggctgaggcaggaagattgcttgaacccaagagatcaaggctgcaatgagccatcacggtgccaccagcctgcactccagcctgggcaacagagcaagatcctgtctcaaaaaatatatattcaataatgaatcgtcacaatttagacaaagaaaagaacgcaagcattcataaatagctcctgctcagtggcggctggtcagataccaggtgccaccatatgcccctcatgtatcactctctggggtgttgggggtgtcactagattccatttctcaggtgaaacacagagagaccaagacattggagagaggtcacacagcaagcagatggctgggcagacatgtgaattcagacgtgatgtagttgacccagactcactatctccatcccctgtggtttgaacacagtgatgtgtcatatgtctgccagcactttcatcttgaacttcccgggctcaagaactataagcaacacatttcagtttttcttttttctttttctttttatcttttgagatggagtcctgctctgttgcccagactggagtgcaatggtgcgatctcagctcactgcaacctcggcctcccgagttcaagtgattcgcctgcctcagcctcctgtgtagctgggaatcacaggcactcaccaccatgcctggttaattttcatatttttagtagagacggggatttgccatgttggccagactggtttcaaactcctgacctcaggtgatccgtctgccttggctttccaaagtgctgggattacaggcgtgaggccactatgcctggcccagtttttatttttatttttgagacagggtctcgctctgtcgcccaggctgcagtgcagtggtgtgatctcagctcactgcatcctcgaccttctaggctcaagcaattctcccacctcagcctcctgagtagtggggactacaggcccacatcaccatgcccagctaatatgtcaaaattttttgtagagacagggtctcactatgttgcccaggctgttttcaaactcctgggctcaagcgatcctcctgccttggcctcccaaagtgctgagattacagacgtgagccactacacctggcccctgccaaatatttttaatccccacttggttgcgtctgaaggtgcagggccgactgatagagaagatcactgtattgtttgttaggtttttaaaaatagctagaaaaaaaaatctgcaccataagacaggttgagaaaaaataactagtagccaagtaaacaaaagtggtcatgggccctccagtgatgactagaccaagcactgtttttattctcagcctctccatatgacatactagaaaatccctctggagaggggattacatgcagatgccagccggatgcggtggctcatgcctgtaatcccagtactttgggaggccgaggcgggcagatcacttgaggtcaggagttccagaccagcctggccaacatggagaaaccccttctctacagaaaatacaaaaaattggccaggtgtggtggtgggcacctgtaatcccagctacttgggctgaggcccaagaattgcttgagcctgtgaggcggaggttgcagtgagccgagatcgcgccattgcactccagcctgggctacagagtgagactttgtctttaaaaatatatatataaaaaataaaaataaataaatgcaaatgactgggcccacctaggactctcttaaactgagtgcctgggtggaggtggagggtgatcctcggagactgtgcccctcgaatccgagatgtctgcatccaggggaagtcttggtgcctttgaaagtccttttgtccccactgggacaaattatcccttttttgttgttttttgagacatggtctcgctctgtcacccaggctggagtgcagtggctcgatctcggcttactgcaaactccgcctcccgggttcaagtgattctcctgcttcagcctcccaagtagctggattacaggcatgggccacaacacctggctaatttttggattttcagtggagacgggatttcaccatgttggccaggctggtctcgaactcctgtgctcaagcggtcctcccttctcggcctcccaaagtgttgggattataggcgtgagccactgcgcccagctgacaatttcttttgggtgattttttagagtctccagttgaatcccacttcccaagccccatgccagattcaaagacagctcacgtctctgtccaagcctcaatctccccctctggaaaatgggttgataccacctgctctcagaattgctgggcactgcttgttaactgatggtgtcctgttttttgtgtcacactaaggtttcgcaacctcagcatgttgacgtttggggcaggatagttcaatttttgtgggggactgtcccgtgcatcatagatgtttaggagcatccctggcccctacccactagacgacagtaaagagttgctggattcagcaaatataaatacagaaaaccccgttaaacgtaaactgcagataaacaaatactgcttctgcctaagtatgtctcaaatgttgcatggcacatacttatactaaaaagacatttgagccaggcgcgttggctcacgcctgtaatcccacaactttgggaggccaaggcgggcggatcacgaagtcaggagttcaaaaccagcctaacatggtgaaacccctctctactaaaaaataaaaattagccaggcgtggtggcaggtgcctgtaatcccagctactcaggagcctgaggcaggagaatcgcttgaacccgggaggtggaggttgcagtgagctgagatcgtgccactgcactccagcctgggtgacagaacgagactccgtctcaaaataacaaacaaacaaacacaactcacagaataggagggaacatttgcaaatcatgtacctgctaagagatttgtatccagaatagaaaaataacttttttttttttttttttttgagatggagtctcgttctgttgcccaggctggagtgcagtggcgtgatctcggctcactgcaagctccgcctcccgggttcaggccattctcctgcctcagcctcccgagtagctgggactacaggcgcctccaccacgcccggctaattttttgtatttttactagagatggggtttcaccgtgttagccaggatggtctcgatctcctgatctcgtgatccacccgcctcggcctcccaaagtgctgggattacagacgtgagccaccgcgcccggccgaaaaaaactcttataaatcaacaataaaaagataaataacagaatgtatttgtttagttatttatttttcagagacaggatctcactgtgtggcccagacttgagtgcaatggccccattctagctcctagctcactgcagccttgaattcccgggctcaagcgatcctcccacctcagccttccaagtatctaggactacaggtgtgtgccaccatgcctgactaagtttttgcttttatttttggtagggagacatcttgctgtgtttcccaggctgatttcaatctcctggcctcaagcaatcctcccacctttgcctctcaaagcactagacggtgtattttcttacaagggcagtgatcccatcatgcggtactcccctcatgacctcatctaaccgtgatcacctcctagaggccccatcttctttttctttttttttaggatggagtcttgctctgtcacccaggctggagtgcagtggtgtgatctcggctcactgcaagctctgcctcccgggttcatgccattctcctgcctcagcctcccgagtacctgggactacaggcgcccgccaccatgcccagctaatttttttgtatttttagtagagatggggtttcaccgtgttagccaggattgtcccgatctcctgaccttgtaatctgcccgcctcagcctcccaaagtgctgggattacaggtgtgagccaccgcgcccggctgaggccctatcttctaataccataacaatgggggtttaaaatttcacaagatgcattttttttttttgagatggaatctcgctctattgcccaggctggagtgcagtggtgcagtcttggctcactgtagcctctgcctcccaggttcaagcaattctcctgcctgagcctcccgagtagctgggattataggcatgtgccaccatacctggctaatttttgtatttgtagtagcaatgcggtttcaccatgttggccaggctggtctcgaactcccaacctcaggtgatctgcccgcctcctaagcctcctaaagtgctgggattacaggtgtgaaccaccgtgcccagccaccatatgcattttatggagacaagaacattctgtccttaacaggcaccaagatcattcagcaggggatagaagggcatcttcagcccgtggtgctagaatgactttgcatccacaggcaaaggaatgaagttggatccctacctcctaccatgctcaaaaaatgagctcaaaatggatcaaagccctaaaggcaatagctaaaaccataaaacttttttctgttgcccaggctagagtgcagtggcgccatcttggctcgctgcaacctccacctcttgggttcaagcaatcctcctgcctcagcctcctgagtagctgggattacaggcgtgcaccaccacacctgggtaatttatggttttctttttttttttttctttttttttgagacggagtctcgctctgttgcccaggctggagcacggtggcatgatctccgctcactgcaagctccgcccccctaggttcatgccattctcctgcctcagcctcccgggtagctgggactacaggtgcccgccaccacgcccggctaattttttgtatttttagtacagatggggtttcaccgtgtttgccaggatggtctcgatctcctgacctagtgatccacccgcctcggcctcccaaagtgctgggattacaggggtgagccaccgcgcctggcctaatttatgtatttttggtagagatggggttttgccatattggccaggctggtctcaaactcctgacctcaggcgattcgcccaccttggcctcccaaagtgatgggattacaggcatgaaacacagcgcctggtcttttttaaaaaaatgttttgaggcagggtctggctctgttgcccaggctggagtgcagtggcatgatctcagctccctgcaacctccccctcccggattcaagtgatcatcccacctcagtctcccaggtagctgagactacaggtgcacgccaccatgtccggctgatttttatatttttagtagagacagggttttgccatgttgcccaggctggtctcaaactcctgggctcaagcgacccttccaaggtggcctcccaaagtgttgggattacaggcatgagccaccgtgcctggcccttgtgatggctaattttctgtatcaacttgactaaactaagggatgcccagatacctggttacacatgatttctgggtgtgtttgtgaggttgtttcaggaagaggttagcatttgcactggtgggctgagcaggtgggcctccccagtgcagatgagcatcatcccaccctgtgagggcctgaatagaacagaaaggcccagggaagttggattgactcatcttctgcccacccccctaagctggggctttgatctcttcctgcccgtggtgctcctggttctcactggaatcagccttgtctctcagggtttccagtgataccataggactttcctgggtctccagcttgcaaatggcaagcagatcacgagacttctccatgactgaaagagtcagttccttataagaaatctatttctggccaggcgtggtgtctcatgcctgtaatcccagcactttgggaggccgaggcaggcggatcacctgagataaggtgtttgaaaccagcctggccaacatggtgaaaccccgtctctactaaaaatacaaaaattagctgggcgtggttgtgcacacctgtaatccgagctactcgggaggctgaggcgggagaatcgcttgaacctgggaggcagaggttgccatgagccaagattgcaccactgcactccaggctgggtgacagagcaagattctgtctcaaaaagaaaagaaatctctttctaggctgggtaggtagctcacgcctgtaaacccagcacttttagaggctgagacaggaggatcgcttgaggccaggagttcaagaccagcctgggcaacataaggagatccccgtctctatatatataaaaacaattttttttaaagaaaaaaagtttaaaaacaagaaatctctttctagtctttccatatatcctattgtttctgtttctctgcagaatcctaatgcagtctctatatgctcaaagagtacaaagatgttgataggtctttaaaaaatttttctttaatttattttttattttttgagacagggtctcactctgtcacccagggtgcagtgcagtggcacaatcaaggctcactgcagcctcaacctcctgggctcaagcagtcctcccccctgagcctcctgagtagctgggactacaggcacgtgccactgcgcctggctaagttttacattttttgcagcaacgggccctcaatatgttgcccaggttggtgttgaactcctaggctcaagtgatcctcctgcctcagcctcccaaagtgctaaggttacagatgtgagccaccgagcccagcccaagggtcaactttaattacgtgtctggctatttcttcataaacaaaatgaacaaccatgtgtgctgcttaagtgtctgccggctggggggatttcccttcaccactgcccttcaaggatgtcccacaaaggggctgcagtgctgtggctgtccacttccaggtgaagcgggagtgtcacccagaatcatcggtaaaccaggccaagcattttctttttttttttttttggttcatgctattctcctgcttcagcctctggagtagctgggactataggcacccgccatcacgcctggctaattttttgtatttttagtagagacggggtttcaccatgttagccaggatggtctcgatctccaggatggtctcgatcttctgacctcgtgatctgcccgcctgggcctcccaaagtgctgggattacaagtgtgagccaccgcgcccggcttttttttttttagatgaagtcttgctctgtcgcccaggctggagcgcagtggtgcgatcttggctcactgcaacctccgcctcccaagttcgagagattctcctgcctcaccctcctgagtagctgggattaccatgctaccatgtaccaccattcccagctaatttttgtactttcagtagagatggagtttctcagtgctggccaggctggtctcaaactcttgacctcaaatgatccgcccaccttggcctcccaaagtgctgagattacaggcgtgagccactgcgcccaggcaataattttttaaaaaatttgtagctgggcatagtggctcacgccaaggtgtgaggattgcttgaggccaggagttctagaccagcctaggcaacataatgagacacgaggccaggcgcggtggctcacgcctataatcccagcactttgggaggctgaggcgggtggatcatgaggtcaggagatcaagaccatcctggctaatatggtgaaaccccatttctactaaaaatacaaaaaattagccaggcgtggtggcggtgcctgtagtcgcagctactcaggaggctgaggcagcagaatggcctgaatccgggaggcggagcttgcagtgaaccaagatcacgccactgcactccagcctgggcaatagagtgagactccgcctcaaaaaaaaaaaaaaaaaaaaacaaccataatgagacaccaactctacaaaaataaataaataaataaaaattaaaaaaattagccaggtatgtaacaagcatctgtagtcctaggatgctgaggtgggaggatggcttgagcccaggagttggaggctgcagtgagctatgagcacaccactgcactctagcctgggcaacacagcaagaccctgtctcaaaaaaaacaaaaaaattggtagaataaatcagcaaaaccatctattcctgggattttctttgctggattctttaattactaactttacttgttgtaggtctatgtagcttttgtatttttttttctgagatggggtcttgctctgtagcccaggctggagtgcagtagtgtgatctcaggtcactgcaacctccacctcccaggcatactcaagcgatcctcctgcctcagcctactgtgaagctgagactacaggtatgcgccaccacacccagctattttgtgtatttttttgtagagatgggggtctcactatgttgcccaggcttgtctctaactcctgagctaaaagcaatctgcccgcttcggcctcccaaagtgctgggattacaggcatgagccaccgcacccagcagttttgtatttattcttgagtcagttttagtagtttttgtgtttctagaaaattttccatttcatttagcttattcagtatgtggtcacccaattgctcatactttttattttattttatttatttatttatttttatttttttgagatggagtctcgctctgtcgccaggctggagtgcagtggcacaatctcggctccctgcaacctccgtttcccgggttcaagcgattctcctggcttggcctcccaagtagctgggagtacaggcacacaccaccaggcccagctattttttttgtatttttagtagagacggggtttcaccatgttggccaggatagtctggatcacttgacctcgtgatccgcctgcctcggcctcccaaagtgctgggattccaggcgtgagccactgcgccaggcctcaactgcttatacttatactcttttctgtttctgtaaagccagtagtattgtcttccctttcattcctgattttagtaatctgagtctctttcctgttttccttggtcaatctagctaaagtttcatcaattttctttttttctttttttttgagatggagtttttgctcttggtgaccaggctggagtgcagtggcgcaatctccactcactgcaacctccacctcccaggttcaagcaattctgccttagcctcccaagtaactgggattacaggcatgcagcaccatgcctggctaattttttgtatttttagtagagacagggtttctccatgttggtcaggctggtctcaaaatcccgacctcaggggattcgccctcctcagcctcccaaagagctaggattacaggcgtgagccaccgcgcctggccgtcaattttcttttcttttttcttttttctttttttttgagatggagtcttactctgtcactcaggctggagtgccgtggcacgatattggctcaccgtaacctccatctcccgggttcaagtgattctcctgcctcagcctcccgagtagctgggattacaggtgcctgccaccacacccagctaatttttgtatatttagtagagacggggtttcaccatttgggccaggctggtcttgaactactgaccttgtgatccacccgccttggcctcccaaagtgctgagattacaggcgtgagccaccgcgcccggccaattttcttagtcttttcagataatgaacttttagttttattcattttctctattgcttttctttttctttttctgttttttttgtttgtttgtttgtttgagagagggtctcacttcatcgcacaggctgaagtgcagtcataggtcactgcagcctggacctcccaggctcaaggaatcctcctgtcttggcctcctgagtgtctggaaccacaggcgcccaccaccacacctgaatgatttatttttagtagagacgaggtcttgctatgttgcccaggttggtcttgaactgaggtcaagtgattctcccacttcagcctcccaaagtgccagtgtcaggcatcagccactgtgcccagccatgcattttattccctttcttatttttctctgttctaatcttcagtatttccttccctctttgggtttatttgctcgtcttctagtttcttaatgtaggaagcttaagttattgatttgagatcctctgtgttttgtttgctttttttttagacggagtcccattctgttgcccaggctggaatgcagtggtgagatctcagctcactgaaacctctgcctcctgggttcaagtgattctcctgcctcagcctccctagaagatgggattacaggtgtgcgccactacacccagctaatttttgtattttcagtagagatggggtttcaccatgttggccaggctggtctcgaactcctgacctcaagtgatctgcccgcctcggcctcccaaattgctgggattacaggcatgagccactgtgcccagctgagagcctctgttttgatgtagacatttatagctatgaatttccctctgagcactgcttttgctccatcccatagtttcggtattttatatttgaattgttattcattttaaagtactttctaatttcccttttaattttttctttaactccataatttagaaacatatttttaatcagtatgaatcacaaattcatatttgttaattttctaaatctccttctgttattaaattctattttcatgccactgtggtaagaaaatatattttgtatgatttcagtcttcttaaatgtattgatacttgtgacctgatatttgctgtattcaagaaaatgttccatgtgcctttggaaggaacatgtattctgtcattgttgggcagagaattctataaatgtctgttaggtctagttggataattgttttgatgaaattttctgtttccttgatgatcttctgtctagttattttatccatttttaaaagtggggtggctgggcacggtggctcatacctgtaatcctagcactttgggaggccaaggcgggtagatcacttgaagtcaggagattaagaccagcctggccaacacggtgaaaccccatctctactaaacatacaaaaaaattagccgggcatggtgtgtgtgcctgtaatcccagcttactctggaggctaaggtaggagaattgcttgaacctgggaggtggaggttgaagtgagttgagatcacaccactgtactccagcctgggcaacagagtgagactgtctcaaaaataaataaataaataataaaaataaaagtggggtataggccaggcacagtggctcatgcctgtaatcccagcactttgggaggctgaggtggacagatcacttgagcccagaaggtcgagaccagcctgggcaacatagcaagaccctttctctacaaaaaataaaaaaaaattaaccaggcgtggtggcacacacctgtagtctcagctactctggaggctgaggcagggagatcacttgagcctgggaggtcgaggttgcagtaggcagagattgcaacattgtgctccagcacccacaatagagtgagaccctgtctgtacaaaaaaaaaaaacaacactttttttttgagacagggtctcactctattgcccaggctagtctcaaactcctttactcaaacactcctcctcctaccttggcctcccaagctgctgggattataggcgtgatccacagtgaccagccttgatttctttttaaatccattctgacacactctgcattttaggtagagtttaatccatttacatttaatgtaattgctgatgagcacttatttctgccattttctgatgtttctttttcttttttttgagacggagtctcactctgtcacccaggctggagtgcagtggcgtgatctcggctcactgcaacctctgcctcccgggttcaagtgattctcgtgcctcagcctcccgagtagccaggattacgggtgtgtgctaccatgcctggctaatttttgtatttttcatagagatggggtttcaccacgttggctaggttagtctcaaactcctgacctcaagggatccacctgcccacctgcctcagcctctcaaagtgctgggattacaggtgtgaggcaccgcacctggcctcctatttttctatacatcttatgtcttttttgttcaattcctccactactgacttcttttttgttaaatagatgtggtttttttttttttttggtctttttctttaaatagatgtattctaatgtaccatcccaatgtcactttgcaattgtgagtgtatacaggaaataagaagagatctttagaaatggagtaggtgggtcaaagtgggagaggggcaattaaaactctgaaaggtgggctgggtgtggtggctcacgcctgtaatcccagcactttgggaggctgaggagggaggatcgcttgagcttaggagactgagaccagcctgagcaacatagtaagacactgtctctacaaataaacaatttaaaagatagctgtgtgtggtggtgtgtgcctgtagtccctgctactcatgaggctgaggtgggaggatcccttgagcccagaaggttgagactgcagtgagctgggtcacaccactgcaccccagtctgggtgacagagcaagaccttgtctaaaaataaattttaaaaactctgataggtgttactaaattgatctgaaatttgtctacaaattccactggatgtgttccaaagagagctttgcatgatattaaaattatctgttggtctgtcagtattcccccttaaactgtgccttcttggagagggagacctacttttattcattgtttatattcctacagtttagtgcatgctaggagcccccctgaaatgttatttttattttctgtagagatgggggttttgctgtttcctaggctggtcttgtactcctgacctcaagtaatcgtcccacctcaatcttccaaagagctgtgattataggtatgagccactatgtcttgtccctgaaaaagagtgaagaaggctgtggctcacacctgtaatcctagcactttgggaggcagaggcaggtggatcacccgaggtcaggagttcgagaccagcctggccaacatggtgaaaccccatttctcctaaaaatacaaaaaaattagccgggcatggtggcaggtgcctgtaatcccagctacttgggaggctgagacaggaaaattgcttgaacccaggaggtggaggttgcagtgagccaagattgtgccattgtactccagcctgggcgactgagtgtaactccgtctcagggaaaaaaaaaaaaatgtgaagaaggagaacagaacctctgtccctgtgatgataaacaggcaaattggaaataaggaaccacggcaaactgggaacttttagttcagctgtgcaagctaggagctctttcagctgacttatttaaagagcagcagaatcttgggacagaaagggaaatgagggtgttttccaagatactttaccagagaggaagcgaacgcctggggttaggaaattaaggcccataaaccagtagcttaccttggatttaaagtgtcagaaaactttttattgagcacctactgtatgaggcatcattctctccgtggggaagatcataatgaacaaggccaacaccctgtccttatggaactatgcattaagagagtgactggtagctcatttattcctctcatatatatatatatatatatatacacacagagagagagagatagagtgtatatatatatacacacacacactccctatctatatataatagagtgactagtagctcatttattcttatatatacagtgtgtatatatatgtatatacacgcactgtctatctctgtctctatatataatagagtgactagtagctcacttattcttatatatacagtgtgtatatatatgtatatacgcgcactctctctatatatataataaagtgactagtagctcatttattcctctcatatatacagtgagatatataatatacatcatatatatatatacatatatatatatgtatatatatatatatatatatatatatatatatatatatatatacactttttttttgagacggagtctcgctctgtcacccaggctggagtgcagtggtgcaatgttggctcactgcagcctccgcctcctgggttcaagcagttctcctgcctcagcctcccaagtagctaggattacaggcacgcaccatacccggctaatttttgtatttttagtagagacggggtttcaccacgttggccaggctggtctcgaactcctgaccttgggtgatccacctgcctctgcctcccaaagtgctgggattacaggtgtgagccacagccttcttcactctttttcagggacaagacatagtggctcatacctataatcacagctctttggaagattgaggtgggacgattacttgaggtcaggagtacaagaccagcctaggaaacagcaaaacccccatctctacaaaaaataaaaaataaaaataacatttcggggggggctcctagcatgcactaaactgtaggaatataaacaatgaataaaagtaggtctccctctccaagaaggcacagtttaagggggaatactgacagaccaacagataattttaatatcatgcaaagctctctttggaacacatccagtggaatttgtagacaaatttcagatcaatttagtaacacctatcagagtttttaaaatttatttttatacaaggtcttgctcttttggcctccgaaagtgctgggattacaggcgtgacacaccgcaccgggctccatatatatcagcagcaaccatatatcacatgagagtatgagaggaataaatgagctactagtcactctatttatattaacataaataaatatatattaatatacacacacacacataggatctctgtcacccaggctggagtgcagtggcacaatcatagctcaccgcagcctcaaactcctgagctcaagtgattctcttgcctctacctcctaaagtgctgggatttcaggaaagagccaccttgcccaggcttcctatgccaccttaatggcaacagaaaccctaggctcagagaggttaagtcacttgtataatttcacacagctggtaagtggtcaggtctagagtccaccacagaccatgtgcttccagttgttttgctgtatacgtccactaaataataatcatagcaaaaatagtaatggtataataacagtggcagaggcatcaggaacagcagcaaccatcatttccaagtgccaggcccagtacgtaagactatccccattcatttatttttacttatttttgagacagggtctcgctctgtcacccaggctggagtgcagtggtgcaatctcggcttactgcagcctcaacttcccagggtcaagcgatcctcccacctcagcctccctagtagctgggactacaggtgcgaaccaccacgcttagctaatttttttttttttttttgagacagagtctcactctgttgcccaggctggtgtgcagtggcacaatcttggctcactgcaacctccgcctcctgggttcaagcgattctcctgcctcagcctcctgagtagctgggactacaggctcgtgccaccacgcctggctaattttttgtatttttagtggagacggggtttcaccatgttagccaggatggtctcgatctcctgacgtcatgatccacccgcctcggcctcccaaagtgctgggattacaggcgtgagccaccgcgctcggcctaatttttatattttttgtagagatggagtctcactctgtctcccaggctggtctcgaactcctgagttcaagcagttctcccgcctcagcctctgagtgttgggattacaggtgtgaccaccgcgccgagccccactccctttttaaaccaatgcacagggagcatctactatgtgcgaggcaccctccattttacagatggggaaactgagttccaagcagcttttgccaggagtgggagcgcaccgtccctgcccagtctctccagttgggcgttccgagaccacctatgtagggtattcggctagcgctcaattaaaccgaaacaccgtcgcagcgaccacaggtgcagaccaccaagtccacaccgccagccgcccgggcgtccccaattagcagttggggcgggaccaagtcctcgagctgccgccgcagcggcggttgaaagccccaccccctgcgcgtgcgcggtgcgcgtcccgtcttcctgctgggcaccaggcgcccgcgaagagcgcgcgcgcttccgccggcgtcgggctcgcgcacgcgcacggcgacggcggcggtggcggcagttcctgctctaggctgcgagcggctggcggcttcgaggggagctgaggcgcggaggggctcggcggcagcggcggcggctcggcactgttacctctcggtccggctggcgccggggcgcgcggtttggtcctttccgggcgcgcgggggcgacagcggcagcgacccgaggcctgcggcctaggcctcagcgcggcggcgggctcgagtgcagcgcggaaccggcccgagggccctacccggaggcaccatgagcgtggaggcgtacgggcccagctcgcagactctcactttcctggacacggaggaggccgagctgcttggcgccgacacacagggctccgagttcgagttcaccgactttactcttcctagccagacgcagacgccccccggcggccccggcggcccgggcggtggcggcgcgggaggcccgggcggcgcgggcgcgggcgctgcggcgggacagctcgacgcgcaggtgagcggcacatggcggtgccggaagcccgggcccggcctcggcgcctgagacctgccccgaactcgcctcgggcccggcctgtgtttggccggagtcccccatcgcggccgggcctggggcgatctgccccgggtcccctactctggctcggcctgagcttacctgccccaggtcctgcaatctgcccgggcctggcctgatctgccccgggtcccccgctccggccgcgacctggctgagttccttcggcccccaactcctgggccgggcagacttgcctcgagtcctccacttcgttcgggaccgagctaacctgaccctgttcctttacgccagctgggtttgctccccctcctgggcccgggctgacctgccttgtgtcccacaatcagtctggcctggagtaacctgccccctgacttatctgagttcttccattccatccgggctagggtgacctgccctggtccctctttcgcaggtctcggtattctgcctcgagttctcctacgacctgggccgggtcttgctcaggccggagcttgagtgacttccctcagtccctttccgggagtatccagggtgacctgccctaatcctgtctctggcctggtccgggggtcctgcccggtctccccattggtgggtctggccgcctgtcccacctcccatctgtggtcgcagccatctgggcaccccacctttcacagtcacggagcgtaggttcgactttccccatgcataggggcgctggccagcggaaggttgaggcagagaagaatttttgcctcccatggaggagcacatattggctggctattaagatcattcaggaagcaggttgtattttgttttttcttgcatcgcctgttgctgaaaccgacctgttacataacttcacaactcttgccttggaaaagttgggtttgagttttgttcttccaataagacagcaataatggctttacataaacgagtctgccacgttggaaacttatttttaatgatgtggatgtttagagaaggttacttaggtattttaaatgggggcttgggttgggagaagtatcgggcatgcatttcctggtcctgggcgctgcttgcctggggtgggagaggggctgggggggtggcgcgtgttgcaccggggtcctggggaatgtcctcatcaccctctggatttcaggttgctttcaccttaggcttgctttgtgcctgacctctcgctcaggtttgttttcctgaatgctccgacaggaagaagctccgaggcttaccttggcacaggtgtcccttggcatatgctggtgtttcagaactgggggaaccactccttgctcatccagagtgagctcagaccctgtccttgcatggggggcttacgtggtagtcgattgagtcactctcgtgggtagaccacccacttgggctttcttttagcccctaatggaagcaaaaaacatttgactcattctaaccccatattccttaaaatagaaggtggggtgtgaggagaacaggtgtgcacgtatgggtgtttttttcagttttgtttacattttgcgaagggagggagggagagaggagagttctcctgaagaagggagtctgagctgcggaggccccacctccttgtagttttcatgccctgtagacctttctgcttccgcagctgtgaaatgggggtggcagttagatttttattccttttaaacataaaggaaacctagatccatgtgtgagtcgactgtatacgctgtctgtaatctgacgtccagcctgtcggggagactcggtaaagatctctgtggagcagtgagccatgagcgtgacagcgcggatcggggggttggctgggtgtgaaaggtaatcattttcttgtgaatccttttaactgtagcgagcataaaacagcaaacctggggcagcctttagttctgcttttgtttctggcattccgtttgggattaattgtggggcatgtccttctctttcagttgaaacaattgattttttttcctgcacctgaacacactgggctgtacaaaaggagagcattaaaacgctcccctggaggtaaacattgcagttgagctcactagaattctgacgacatcagagggtttgtcctgtgctacttgtaattgacccagatgccccacccacctgttacctgtaatttggatttgtttgtggggaatgggagtggtacccctttgcatcacaaggggaagaacggaatttgggggcaaggaagtctatgaatatcattcaagggaaagcggaagaaagttatctcttgtgtgaattgaaggcagtgtctgctaagatatttgggaagactttccctgtttgtcctcaggagttggccgtgtaaccagctgttaagttgggggctcctggaaactctcattctgcttttttaatttttattttactggggaagtggctatcagctgtcaagtgccctgcagtcacttttgcttagcggctttattgaaatagaattcacttgccacaacatacaatttacccatataaagtgtacagttcggcggcttttatttagtatattcagagttgtgcagccattaccacagtaaactttagaacatttttgtcaccccagagataaaccctgcaccccttagcccatccgtcctacctccacagcccctggcaaccactcacctgctttctgtctcaagatgtgcctgttctgggcatttcacatcaacggaatcatatcatatatggtgttttgtgtctggctcctttcactctgcgtgatgtgtgagaagtagctacaaggtgagcttcgtagctgttccctggccgagcattcaggaaaatgaacctgatcgaggttcatccacgctgtggtatgtgtcatcatttcattccttttttttttttgagacagagtctcgctctgttgcccaggctggggtgcagtggcgtgatcttggctcactgcaacctgtgcctcccaggttcaagcgattctcctgcctcagcctccccagtagctgggattacaggtgcacaccaccatgccccggctaatttttgtatttttagtagagacggggtttcaccatgttggccagatggtcttgatttcctgaccatgtggtccacttgcctcggcctcccaaagtgctgggattacaagcatgagccaccgcacctggccagcatttcattcctttttaaggctgagtaatattccatgggtggaatggtccagatggatggaccatgttttgtttatctcgtcatctgttgatggacatttgggttgtttccacctcttggcttttgtgaatagcactgctgtggccatgagtgtacaggtttctgcgtggatgtgtttatagacctgctgggccgcgtagtaaccttgggtttaatggtttcagtaactgcaagactgttttccagtgtgtagccactttccataccaaccctacctgaactggttttgcgcagttggttttcccttaatgtgtgttgaaagacagtgtgtccccaccgggatgggaaagtggcagcaggggtgactccctgcactcagagctggttcagataacactccttttcttgtttatgaaatgaaactgatatttatcaaagcccttgagatcctgggatgaaaagcgctgacacagtattgccaagtgtccttaagatacagggacagttttcgagcatctgaccttttcctgggcccttctctgctgccacttctcctgctcccaggacagtgaaggtaatttcagaagtcctttgcataatagctggtgttacaagccttttggtctgcctggttggaatatttcctcttgactgtagcttctgccctggatcctccaaacgggaactagagtgaaactcttaagagttggaaatactgctcagtattaagaaggaacaaactattgatacctgcaacaacatggatgtgtctcataataattacttttttgtatgtgtcattcatcatatgatttaattcataaaaaaattctagaaattgccagctagcctgcagcaatagaaagcagaccagtggtggctggacagaaaggtgggaaaggggaggcaggtgacaaagggcacaggaaacttgggggtaatggacgtttttattatcgtgattgtagtgatagttttatgggtgtttaagtacattgatgtatgtcagtttctaaaatggcacactaaacatttgcagcttatggtatgtcagttatgcctcaatgaaactggaaagaaaagtcagggagataccactatccacccatttttttttttttttttttttggagacggagtctcgctctgttgcctaggctggagtgcagtggcacaatcttggctcactgcaacctccacctcctgggttcaagcgattctcctgccctagcctctcgagtagctgggactacaggtgtgtgctaccatgcccggctaattttttgtatttttatagaggcagggtttcaccatgttagtcaggatggtcttgatctcctgacctcgtgttccgccctcctctacctcctaaagtgctgggattacagccgtgagccactgcgcccagcctgccatactttttttaaaaggctgaaagtgctacttgggttttttgtttttgttttaaggcaaagtctcattctgtcacccaggctgtagtgcagtggcgttatcatgggtcactgcagcctcgacctcctgggctcaagcgatccttccacctcagcctcccaagtagctgggactacaggtgtgtgccaccacgtctggctgatttttctttttttgtagagatggggttttgccatgttacccaggctggtcttgaactcctgggctcaagagatcctctcacctcaggcctcccaagtgttggaattacagagtgagccattgagcctggcaaaagtgctgcctggaactctcatgccatacacctacctgtgacctagcagagatgaaggtgtgtgtacgcagggctgcgccaaatgctgacagcatctcttcatgagaaccccaaaccggaagcagccccagtggccatcagcagatgaatgggtaaacaaagcagtgtgtacatccagtgggaaaaatgtgtgcctattggtttgagttgcttttcttagctcacctgaaagtatgaggtctgtgggtaggtacagaccttttaggcagcaacacgcatgtttttgtgcaggtgctctgggtgaccttgtagatagatgctgcttggtactggtcccactttgttccttcatcctcaggtcaggtctgcactgcctgttccgtctccactcctggtagcctgtgggagtcacagctgaatagtcatctcgtactgggattttactctgagtgcatgagttgtttccctaggaaaaacatgctgtctttctggatcgtaagggacaactagctaaagctcctagccgacctgtcgtccagccctcactctcctcctgccagacttctctgtattgcctccacttctctgagtgtgtaaacctgggctcacttttccttttgaagtggtaaaatactcaggatagaaagttgctactttgtcttcaaagccattgtcctgacctatccttgactgtccaggtgaacacaccatcttctgctgagccctgagattatgaccaaggcggggtgagttccatacagtcttgggttccgaaaagtggtgagtttaaaatctgcacatgtagctgggcacgatggcccatgcctgtaatcccagtactttgggaggctgaggcaggcagatcatttgagctcaggagtttgagaccagcctgggcaaaatgtccatgatcgcaccactgcactccagcctgggtgacagagtgagaccttgtcttaataaaaagaagaaaatccaggccgggcttggtggctcacgcctgtaatctcagcactttgagaggcagaggcaggtgaatcaccggaggtcaggagttccagaccagcttgaccaacatggagaaatcctgtctctactaaaaatacaaaattagctgggtatagtggcacatgcctgtaatcccagttacttgggaggctgaggcaggagaatcgcttgaacccgggaggtggaggttgcggtgagctgagattgtgccattgcactccagcctgggcaacaagagcaaaactccatcttaaaaaaaaaaaatgctcatgacttcattttggctttttgaatcctctggtagcccaggtgtggttttagggtgccagaacattggagataagatgccgtttacctggaggagtgttggcaagtgtttggtcagcacttaccccttagtagacttactgagtgtgttttcaaattgttaggagtttcccagtgattatgtgaaagtgacctgagctgacactttacagttagtggtgaatacacgaaacaatttctatttttatcacaattaattacccggattcaggatgacggggtgggggattatgactaatactataccaggactaactaaaaaaagagttccctctcagcctagctaccaccaccacaaaagcttaccaccatcagctaccaccacatttctctcattgcttgattgaagtctgatgacctaccagggaacccccttcttttctttttagacggagtctcgcactgtcgcccaggctggagtgcagtggcgcgatcttggctcactacaacctctgcctcccgggtttaagtgattttcctgcctcagcctcccgagtagctgggattacaggtgcgcaccaccatgcccaactaatttttttgtatttttagtagagacggggtttcaccatgttggccaggctggtctggagctcctgacctcaggtgatctgcccaccttggccttccaaggtgctgagattacaggcatgagccaccacacctggcccctttaagtatagaacttagtgctgttttagtaaatttacggaattgggcagccaccacagcagtgccttgctgtctctgatttctctttcgctcctttccgctccctccccaccaccccttgtcagaccctgtgctcatgcccaaggtcacccgttagggaggtgtgtccaccgcctcagactgagccctgccctggggaggtcagaaacatggccaagccctggccccatgctcccccgcctttaagccccgtgtctgttaacttttgcaccctctgcgagctgctgggcaacctcttcagcctggccctggacttcagccatcccctgctgttttcttacttcctggccttgctgtgcttgtgggactgagggcagtgaggccagcagagggagagtgaagcctttgacccccgcggttgcactgttagaagacagcacatgccgcctggccagggtgctgtgagggccccaggagtaggagtgggctcccctgctaagggaaagcctgtgggaatggcgcctctggagttgttcagaagctgtacctgccaggcagaggggtgggcacagcactttgcctagaaggagggagggtggatgtggggccagtggggccagggcaggggctgggctgtgtcctggagcctttaggagctgctggggtgccttgaccaaggctgggaggagggctctgagatggcagtggcgggggttaggggaggggctgtggtgttggaggttgggcattgtggcccaggttggaccccgaatggatggaggggccacagggcagtggagacggaggacaccgggatcagggctgtgtgtgtacatgtgtgtatgcatgagtaagtgtgtaagtgtgtgtgcctgtgggaactgccagggtaccggctgccccctcccagtcctcacagggagccacagacttaaaaagcagctccagctcctgcctgtggtctcatcagggtccataattccccaggctgagccggggctctctccgctggggaggcaccgtcctgagggccttgtgagagggagaggcctccccagagcggctgcaaggaagctaaagggcacatgctgggcagcagctcacaactgaggggcagtttgtgcttgtcatggtggtgagagtgctttcatggtggtcgggatagtctagcttggcagagaagggccgtgacacccagctgtgctctgtggcattcagggccgaggggcctggctggaggggctggtgggaggagtgggtccgggccctggcaccagtgctgttcggggctccggagggttcatggccttgagctctccttgctggagcacatacctatgagagcaaagttctgctttctctgatacatggagggctgctgggtcctggagtctggtggctggcagcaggtccttgtgcctttttctgtgttggtcgaatagcagcttaagagccgggtaacccagccgggcttctcaggtcccgtgggcctttgccaggatggtgtctagatgtgtaaaggtggctcgttgggctctagagagcccttgtgacagtgagcatggcatcttcctgaagcatcagctccttgcagagcgagtgcaggctcctggcggccctgggagagggggttgcagatcccaggcagaggtgtttggtcagagctgcgctgcctgcaccgtcctcacctctttttcagtacggggatccatgcgcatagcttgcagccctgctgcatcctccgtgtagaaacgtctacgatgaattctctaacatacaagagctggtgagccctgtgcctccgtctccctgatgagacagttgtgaaggttttcttctccctgttttctttttttttcttcactggtgtgtgtttttaaagcaagtcttttgtgtcctttcacctttgtgtctgaggtggagccctgtgaattggcgatactcagccattttgacctgcagtatgtagtatgcatttctagaagcagaaaagggcgcctgtcctgaatagctgcagcgccgttatcacacaagcagcgtcaacaatggcttttcacgattgtccgatatgtagggacagttggcctctctccacagcagattctttactgggatcctggaggtccgctgttgagatgatggctgtctctgggccctgcgttccgagcggcctctcccgctgcttttcatctcgccaagctgcagtctggcctgggttgttgtcctgtgaggtgtgcaccttctggactgaacccctcattgtcacacttcagcttcttgctgaaggtgtggagtggatttcatctcaggctgtgggctccagggagagtggctgatccccgggctgggaaggcaggggcggcctgaggtgagctggggatgccttgcacactcggcccgttgaaatgaacctcacgcggactctagcacacctggctggaacaagggtctgccggtccacacaggtgccattggtgagaggggaggcgagaggccctttctctttgggaagaacgaatgtgagcctaggcaacatattgaaaaattaaaaaactttctaggcattgtgcacacctgtagtctcagctacttgggacgctgaggcaagaggatctcttttaagttcaggagtttgaggatgcagtgagctatgattctaccactgcactccagcctgggtggcagagcaagaccctgtctcaaaaaaataaaggaatggagagcctggggaccgctgtgtcgggtggtgggactatgtgaaagatggtcaactcctagcagtttcacgtggttcaaactaatagattaaaggtggctaaagagacatcacaaatcacgtgcagtcattaactgggacttggattcttaaaaacctgtaaaagacgttatgaagacattggggtgatgggtgaatgtgtattaaccaacagtgtggcaggctgggtgcgctcatgagccagctgttttgtggggatgtggagaaagccctcccctggggccggccactctgaaatgggtcaggaagagataagtgtgtgagagcaaggggagtcggagtgcagggggatgtgatggagagtgtccagctggaggggtgtgggggtcggatttctgtagctttggaatttttcaaaataagaggaaatatcagggcagaatccttccagtttgggggccagacctcctggcaaccctctgccttgagagggctcagagaccctgcagcttcttggcagtcatcactctgagggtgtggtgaacttcctattccctcccctttttttcctttacaatttttttaattaaaaaaaatttgggggggtgctgggtgcagtggctcacacctgtaatcccagcattttgggaggccaaggtgggtggatcacctgaggttgggagttcgagaccagccagaccaacatggagaaaccctgtctctactaaaaataggcgtggtggcgcatgcctgtaatcccagctacttgggaggctgaggcaggagaatcgcttgaacccgggaggcagaggttgcggtgagccgagatcgcgccattgcactccagcgtaggcaacgagagtgaaactccgtctcaaaaaaaaaaaaaatttaaatagagatggggcctcactatcttgcccaggctattctcaaaccctgggctcaagatcctcctgccttggcctcccagagtgctgggattacaggtatgagccatcacgcctggcctcctgccctctcttttatttaagccttggaattagagaatcaggaatgagctgctttgccttttgagcttggcctttagccaacaatgttgagggcctcctggggtgcaggctccatctaggtgctgggctcatggcagggagcaggacagacaatgccccacgggggccttgaggtggggtcagaggatgcctgcctgagaggcaccctgtggacctcaccctgaggctgagggaacagcaggtgcaaggcctgggtgctggcaaatgcagacagtggtgcaaatgttggagtagatgtctgcggcctgagagtttatgatggcacatttggggggatttttgagtttttgaatttctgtggttttcgtctgtgggaatgaagtgactttctttgttttttttttttttttttgagacagagtcttgctctgtgactcaggctggagtgcagtggtgtgatctcggctcactgcaacctccgcctcctgggttcaagcgattctcctgcacggggattacaggtgcgcatcaccatgcccagctaatcttttgtatttttagtagagatggggttttgccatgttggccaggcttgtgtgtgtgtgtgtgtgtgtgtgtgtgtgtgtgttgttgttaagagagacagggtcttggtctgttgctcaggctaaagttcagtggtaccatcatagctcacagcggccttgacctgctggggtcaagcaatcctccggcctcaacctcctgattagctgggactacaagtgtgcgccaccacacctggctcgtttgtgtatttttttgtggagacaggatcttggctgtgttgcccaggctggtcttgagaactcccgggctcaagcgatcctcccaaagtgttgggatgacaggtgtgagccaccattcctagccttgaagtgacctactgttgtgctgccctgatgcacggtctgagttctggagcatgtctctgggcagaaagcccctgtacagctcttagatggacttccaggatgtggttttagtcgtagctaggttcacatccagaactaaaggagttagagactccagctctggggcctcgtgtatgactaggaagtgggaattctaggatacgtctttaaatactgtgtccagagcagaggtgatgggaggagctgctttttttgggggccgggggggggtttgggtttttcttttttctttttttttttgagatggagttttgctcttgttgcccaaggtggagcgtgcagtggcacggtctcagctcactgcaacctgcgcctcctgggttcaagcaattctcctgtctcagcctcccaagtagctgagattacaggcacgtgccaccacgtccagctaattttttttttttttgcctttttagtaaaaacgaggtttcaccatgttggccaggctggtctcgaactcctgacctcaggtgatccgccctgccgaggagctgcttcttggtgaatgcctgggatgggtacagggaggccttgcccctccagagcctccctggtgaggggataagttgacagcctcaaaggactttattggagtggcagctctgtgccagctgaagatgatgaccctcttgtccttcacccatcatgtcccctggcgtgggctgtggaacttctctgtgccaggcactgtcccctactgctgttttacctcatttcatgatagttcctagggtcaaatatatttttgaaattaatgttttatcttgaaacttttcagagagtgaagggagaagttaacccagaagtcagcttgtgttgtgaccagatcactgcagggcagcattgggcccagtgtgcatctgtgcgtgcaggtagcacgtgcccatgcaccccagccaggcgggctggaggggcctctgtggggtgctgctccccatgagcacctgtccctaggctcgcacaggtgctgcatcacacagcaagggcattaggccgaggggctgtctggggtgctgggactggcagtgggagatttggtgccgtccctaggggagctcccatcactcctccctggcccttaattttgtgccaccttgtgttctgccatgacacagtgctcccgctgcctgaccccgtggtggggttaggtggcctatgggggccatgccagggactgttggccatgtcatttgaggtgctggtacttgggagtggcatgaggagccccagtggctgtgtggtctccttgcaagtgtcctgtgcagttgtggcctgatgacttagagccatgcgctgtctgcctttgctgaacatagaagaggcgccttcagtgagggtgtggcctcggttgccaagggtatctcagtgttcagtttctacttcatcctcaggagagggctgccttgaagggatggggagggtgaggtggcagtggatgtggccagtgacatttccacatctgcatgggtggcagcttcgtagtgtttgatgagccttacactgtggtgggtctggcatcatgaagctgtcctcagggcacactgctgtcagtctgtaaaagtcaccctgctccttgtggtcctcagtcatgggaaagaagcatcttcctaagcatcctggttgtgggcatggacatggctctgtggctaggcgggggttagaccagctgtgtgggggaccggggggtgtagaaggccaccagtggcccttttttggccaggtaggtttgctagagaagagtgaaatccagtcagaacaagggaaactgtctcaaagcagagatgaggccagggtgtcacaccagagtcatcgaggctggttcttctgcactgagtcctggaagctgcagcctcactcaggtgacactgcgttctgctgcaggttgggcccgaaggcatcctgcagaacggggctgtggacgacagtgtagccaagaccagccagttgttggctgagttgaacttcgaggaagatgaagaagacacctattacacgaaggacctccccatacacgcctgcaggtgagctgagctcagctgggcctgggcatgtgctggacaggtgggtgcctctggcatgggcctgggacactcacctcccaggtacagggtggcgcccttgtgctgtgactctgggtggcggtgtcctcgggagtaaggaaattgctcaggccatgtgcacagccaaggcctgttaccggtcaggaggtgggctcagcaacctccgacaccctgaattcaccagctggtgggaaaagttttccttcctttggcctcctcagaccctgggggcattgcctggtacctgcgcactcactcatagaaagaatttgtcatggcattgggtgagcatctggggtgggagggtgagtggagcagctgagataccctcacaaagcagttgctgcagggttctggggcatccctgcctcccgctgccttggccgtgcctggagaattggatgtgaagacagtagttagtggatagacctgcatgttgacaaatttagaattctcatctcgagtgggatcgtcccttgttgaggcttatttctgtatttttgtgacacacaagtgaggaaatgtagattagaagaggggagaaggttttggccaggcacggtggctcactcctgtaatcccagcactttgggaggccgaggtgggcagatcacgaggtcaggagatcgagaccatcctggctaacacggtgaaaccctgtctccactaaaaatacaaaaaattagccaagcatggtggcgggcgcctgtagtcccagctagctacttgggaggctgaggcaggagaatgacatgaacccgggaggcggaggttgtagtgagccgagatcgcaccactgcactccagcctgagcgacagtcacggcaggtttgggcctgagccctgcctctgtctgtgggcacccacttggggccctccctgcagctccttgcccgcgtgctgcccagcgctccgggactgaggctgctcttcgctaggcttggtgggcaggcactctttcctgcatctcagctcttcactcattctcatttacagatgttttcgtgtatgtaattgtgttctcttaacacacagagatggccataagtcctggtgcagctctggggagctagtatttttgggtttggtatgtggattttcagaaaaccacagccagtggtggggtgaggctctcccgaggctcctcgcttgggcttcggggcctgagcttcagggcgctgctgctgcagggtctgtgcccagctccctgggagcacagtgccctctgctggagcccagagttcaccatgaccactgggtctgaggctggattcctgaatttcaggccaaagaacggggactagaatggccctggaggagtgaggcctccttccagcaggactctccttggaggtggctttgctccttatcccctcggagcttctgccacataccccttccctgcattcttggatttgagaagccctggttaactggtttgatttggttactgggattgttggggttgagtatgtgtttaatgaagaacttaaaaatgttgtcagaggaaagaatttcacatcttgccaaatgaaaaccagagagcaagcttccagctgtaactgtcgctgttttgattttttagttactgtggaatacacgatcctgcctgcgtggtttactgtaataccagcaagaagtggttctgcaacggacgtggaaatacttctggcaggtagataatcagaccatgcatgtgtgtttaatcagtgctgtgctcagatttgtgtgtaaattatggaaatgttgaagcaaagcgtaatataaaatcacgctaacaaacctgggttttttcctcctctgtgactggtttaacttgaaacagatggtggtgtgtgaatgccttaatgtatttacccttgatttattctctgtggctctttttattatgcaagtagggttggcttaattctccttcccagtttttatttcgatttttctgcaagatgagctcttggcacacccgctgatcttcattaacgggaggatgttcccaaggcagtaacgggcatccaggggcgctggttcctgagcaagcttgctctggcctgagctcatcggagctgtccggaggctaattcaggccagatcctgaatcatcggcttcaattaagttcacttgaccgtcggcgctgggcttgccttcctgatgttgatcagctgcagctggactgtgtcgcttgttctgtgtttgggacaggacagtgttctcccagtgcccaaattccaaggggggagttcgatggtcttgcccgagtggtgggactctcgtcctggtgggtcccgtgctagcggctccccttcccctccaggttgctgtgtacaggtcactccactgctggagaggatggagcagagcctgggaggcagagctccgaggtgctagcaaggaagtgtggggtctttttctgaggttcacgttctggagaaagaaaatgaccaaagcccggaggcaggcttacttgtgctgacacaagcccctcctgtgcctttgacagctgtgggtctcggagggttacagatggagcagtcagatctcgtggcatctctgagttagtaacttgaaatatggtgttatgagcaaggccagaaaggggctgctgtttttaaaagattttaaagaagggtatcttctggataaccaaaagacattcttgtcccattttcagaatcttctgggtaatttaagtgttgctatgtttgcatttagttcctcttgttcaggaaaagcaactaaataaaacttctcttagctggcaaccccagcttccggtcagcatagccaagaacagggaagtgagcaaaagggcctctgagaaacaacaggcttgagccaagcaccactgagcattctgtgcgaggcccaggggaaggtgaggaagcagccgctggcccttagggatcttggctgtgacagggtgaggatgcatgagaagacacggagacagctgattctgcccacgtggccggcagggctccagagtggagtcgggctttggagatgctcagagtggccatggctggttagagaatcctgggcctcgtggcagggagaagggttagaagattagctgagctgaagcttttggcaagaatggttttccagaggggaagagagagggcgcggtgaggaaggctgggaggccctgcaggcgtgttcagagctgctggagacaccggaagagcccaaaggcagagcagctgggcatccttgttagatacggcagataggtgctggagggtggctggcttggcacagggcagggttcagcccagaccgcggtttaggtgagcagtgtcctggccacgtcgcagcaaggaaggagccgagccagccagggcttcacacacagccctgggcttctgtagaaccgcccccgcctctgctcaacctttttgctgctttttgcgggggtttccagtcgcctgcttatcagatttcccggcctgcagcaaagcaggagggactgttgctcctggaagtaggcacagggcctctgaggagtgatttcagaagaagccacagaagatggtggcgggggttgaccttggaaagaaggggctggggccttgtgggaaatgtctctgaccccacagcagccctgggccaacaatgggttaaattaggcctgataagttggatttaagaaagcaggatttttaaaaaaggcaggaactatgtgaaccgtgttaaggaagttttccttaaagtggttcaagttgggattgatttttgtgctcagtggggagctagtttgggggagggctggcccccagagatgccagatggatgaggtgtgactgcctctgctaatggaccgtgaacggtaccggaacttttaacaggggcccgaaaattggaagtggtgaaaagccaaattttgggtgttaaccgtttatcatttcctggtttcagccacattgtaaatcaccttgtgagggcaaaatgcaaagaggtgaccctgcacaaggacgggcccctgggggagacagtcctggagtgctacaactgcggctgtcgcaacgtcttcctcctcggcttcatcccggccaaagctgactcagtggtggtgctgctgtgcaggtgagtggtccccagatgtctcctgggggtgacctttaagctccagccgtctcctcacaagccttggcccagcccagcccagccgtggctctaactccagggagttgtcctccaaagatggtttttgctgaagggtgaggcatgagagcgtttaggcgctgaggcttgttaaggagtcggcagtgccgtgtaactcttttggggcgttctggctaagtcataaaaacaattctgtaaaaacaaagtctgttctgagttttaagagttcagagctcaagtgcacagggagatgcgatttattactaacagtttgaaggtaatgtgatcacataataaaatgcagggcatgcccctttgggtgaaaggtcagcatgggagggggccctccctgctccggggcttcagggacgggagctggtcctcacggccccctcccgctctgcaggcagccctgtgccagccagagcagcctcaaggacatcaactgggacagctcgcagtggcagccgctgatccaggaccgctgcttcctgtcctggctggtcaagatcccctccgagcaggagcagctgcgggcacgccagatcacggcacagcagatcaacaagctggaggagctgtggaaggtggggctgcccagcgggccgacccgtgccttcgtgtggtttctggttgcggggaggggagtgtcttcagagacggcttgacccagtgagaccgctggagattctctgaaaggaattcaggcagacctctgccacctctacgtggaatgacctcagggcaccttggtcaccttccatccaggcagccttacctgaccgagaagatcctggccttggggaaaggaaagctctggctgctggaatttttcttgtcttgccggggtgaggatgggtggtgggaggggaagaatggggctggctgtgggcagacttgtcctgcagagcctgaacctgcccagacaggtgggctgcgagaatgtcctggggaaataggttggtgtcgaggtcggcacagtcagctgagacagaggggagaggagagggtgccgggtcaagtagtgggtgcctggccctccttccacagacagccctcacttttccccacggaagcctttctgtgcttccagctgtttaggattttgtgataaagtagttctaataactaggctagaagttttcatttgcctcccattcagtcagaaatctcacataggaaatgaagtgcaagttaaaatatttttttaagcattgttcagccgggtacctttccacttggattttccggttgccagatgatttcatgattcccgtttatatctgaacagcccagaaaatgtcctgtccccaccagcatggcactcactgagggagctggcccccaggggaagagctgcgggcccatgttggtctggctcagggttagcagacgtgggagacaggcctcccgggctgtggacacagcgagagaaaccggtggtctttgtggcagcctgcgaggcgggttagctgctctcgttcacaagctgggcatacttggaggaagcagctggctctgaaggtgccctctgctgtggacagtgtgtcaggctggtgcctggggctttgtaggcaggttcacccaagtaccggaaccccgctggggtgcggagcagcagctgaggcccaggcatgggccaggccggtgtgcagctccctgtgtggcatggagttcccgttcccagggttctccttgcaggtggggctgcgccagaacccctccatgccacccaccgtggcccattctgagaagcggcatgtgtgctccatccctctggtgcctctgcgccctcgttcatttgcatgtagggaaaaacaggacgagtgtggcgcggtgttgttgtcttctaggaaaacccttctgccacgctggaggacctggagaagccgggggtggacgaggagccgcagcatgtcctcctgcggtacgaggacgcctaccagtaccagaacatattcgggcccctggtcaagctggaggccgactacgacaagaagctgaaggagtcccaggtgatgtgtgcgagagggcttggcctggggtgggctctggctctcacagctctctcctcaggcttccagagggaggttttctctccaggctgtgggagctgatgtgggctgcagccgcgacacctgagagttggaacttgcggatccgggcctggcagcccggtggtctgagcccccgccctcagatctgacatcagcctcagtgttttctgtttaaatccaacacatctttcccagtggggtccacagctttgcccacagttgcgagagttagactcgggcgtgatccctgtgaagaccacatttaggcaacgggagccctggagcgctgacctcccctccctccctcccctcctctttctgtccctccctcccctcctctttctgtccctccctcccctcctctctctcttcctccctcccacagcagctgctccctggccacggaggcctctggtgtgcggtgaagcctccagacgggattggcctgtgtgtgttccggggactcctaatggcttctctttcagatgtgcccttggtggcatttggggctgcaggtgccactcacggcgcctgctctcacggcagaggcttgctgtagggcccgcctcatggggcctcgggcatgtggaggccaggcccgggcctgtgctggaggctaaccggggctcttgtttttcatgtgctcagactcaagataacatcactgtcaggtgggacctgggccttaacaagaagagaatcgcctacttcactttgcccaagactgactctggtaatgaggatttagtcataatttggttaagaggtgattttaagttttaaaatatttgtgaccataagtagcataaattcctagttccacccttgtaaagtgccccttaatttgaactctccctggtggaagcgacggcgtgggttaaaatggccacctctctcacttttttacctcaagacatgcggctcatgcagggggatgagatatgcctgcggtacaaaggggaccttgcgcccctgtggaaagggatcggccacgtcatcaaggtccctgatagtatccttcatgtgaagagggtgtggccggctggtgggagaggaaagtgggggcatcaggtggaggccactgtggatttgatgctcactgctgggccagcatctcatgctctgtggtgggtgctggttggcatcgccctccactgctcttaggagaatcacagggccttcaccttcaggggacagctggttgtatggttgcttcccctctgcccgaatggtgatgttggtgatgccacttgtgtggcgcgtccctgggctgactctggaagttaatgtatgccgcttgtgtggcacgtccctggactgactctggaggttaatgtggctgcaggagcgccttacctggacgctgactctgcacacggaggttccagaagccagtggtcacatgcagaccctctgagcacacacttgctcccaggccatgtttgggaatgtgcagtgacctcatggtgatgcagcctgccggccagagtggggcagctgtaaggcacaggtgcagtcagaggcttgggtggggaggagtcctgggagaagacaccgcgggtcagactcaggctgcctcttggtgactggccaatgctgctggggcctgaccattcagcggtggcctccacaggggtagggagagttgtctcccacacccaccctgggcctgacaagctcatcctgaacacgtgagaccggttttggggctcggggtcgagggaagggtgttgcctaccggccacagcctcctggagggcagtttgcttgtgtatgtggagccttttgcttggccgtactgggaggggtgttgtttctgtggaactgtgagaagagctgctgtggccaaagctgggttctgcgagctctgcctgcccctgctggccacatgtgcaggagctcccggtgaggtcctggggcccaggatgtggctgctccctgctggtgagcgctgctggcttcgctgccgccctctgcgtctctgaaaggggcctagatgggtggctgggagtggcaaggaggaactccaggctggctgggggtgggacaccggctcatggtgaggtagagtctttcttcaaggatgctgtccttctggtctctggtctggtgttggctgcacgtttttagcgtttggtgcagagccagcggtgtcttaagtaactaaattttaaaaacgctgtttaaagagcgtgtaccaagggtggcccagaaaggtcagcccggcttttgacaaggatgcaaacttaactcagcacacagattatggcgatgagatcgccattgagctgcggagcagcgtgggtgcacctgtggaggtgactcacaacttccaggtggattttgtgtggaagtcgacctcctttgacaggtacgtcttctcccatcactgccccctgttccctggttgccacctgtggcatctttatgagccctccccgtcactgtggagtggggttccccacccagctctgcaaactcaggatgtcggagaggcggccacagctgtgcgtgtcgccaaccccaaaccctcctcacaggatgcagagcgcattgaaaacgtttgccgtggatgagacctcggtgtctggctacatctaccacaagctgttgggccacgaggtggaggacgtaatcatcaagtgccagctgcccaagcgcttcacggcgcagggcctccccgacctcaaccactcccaggtgcgcgccgtcctcagcgcgcggggcctcgcccatgggccgggacgcaagcggaggctgcccctaacggccgcttgtattgaaggtttatgccgtgaagactgtgctgcaaagaccactgagcctgatccagggcccgccaggcacggggaagacggtgacgtcggccaccatcgtctaccacctggcccggcaaggcaacgggtagggctgacacggcccttgcgggcaagacccgggagggctttagggtggccagatggaaggcctggtgctgggagccttgggctctgtcacaccgaagagagcacgtggcgggtagtgtcgccatggtgcctaccgctctctatgtgacattattcgtgtcagctccaaccttaggattgcattttagtaaccaggtctgctactggtttagaaaactgggggcagggggggcatggctgcagcagcgtgagttccgtgtgcggcactttatagtgtggcgggatggtgcaagttccagccttggcattgcttgcggtgggtagagctgtgaagcctgggctgtctggatctgagctccttcggcatcgtgtcattactgcctgttaaaaatgtcaggagtttaaggccagcctgaacagggtgagacgtctctacaaaaaaaaaattcagaaattagctgggggtagtggcgtgcacctgtggtcccagctactcaggaggctgaggtgggaggattgcttgagcccaggatgttgaggctgcaattagctgagatcacaccactgcactccagcctgggcaacagagcaagaccctgtctcaaaaaacagagtcttggcttactacgttcaccgagcttcctctgggtaagcactgagctgccccaatggtgttgcaggccggtgctggtgtgtgctccgagcaacatcgccgtggaccagctaacggagaagatccaccagacggggctaaaggtcgtgcgcctctgcgccaagagccgtgaggccatcgactccccggtgtcttttctggccctgcacaaccagatcaggaacatggacaggtgtgtgtcgagtccatccctcccagttggtccctgagcttctgcgggtgacatgtacagaactcaggcaccctgctgacctgcatgtgcttccagcatgcctgagctgcagaagctgcagcagctgaaagacgagactggggagctgtcgtctgccgacgagaagcggtaccgggccttgaagcgcaccgcagagagagagctgctgatggtgagtgcccctcctgcctgcaaaagggcctgtgggctggcggcctgatggtttttgtttgggccaaagcacctatttgaattgttgctttgcttctggaaagagaacttagatgctctctacttggcctctctgcgctcagttgtacagtaaattagggacatctcgctgcctggaacacggtcttctagggagtctccactccctgccagcctccactgggatccggcagtggatctagaacactcctgctctttcataaccaaccagcctgaactggaatcagcctgagtgcaggttccagcagctcagcactgccccttggaggctgtcgtgaggcgcagagctcttggtgtggagaggttgccttctgtgaaacatgaccgtttaaggatcttaaaagtttgtaatcaccacagcctggaccatgtatcttgtctgggagggacagcttgttttttatagtgtcagggagggtgagaaacaggagagcttctgtgttctgtcccacctgccctccggggtctggtggcgtttacagtgcaggtgccctgatgcctctgcacccttccccagaacgcagatgtcatctgctgcacatgtgtgggcgccggtgacccgaggctggccaagatgcagttccgctccattttaatcgacgaaagcacccaggccaccgagccggagtgcatggttcccgtggtcctcggggccaagcaggtgggctgcctcccctgccctcctgtgtgaaaactcgtgtgtgtgattcttggtgtttgtcttttaaaacaccttgtattgacgtaggatgcccagcagagtgtgcgcacactgggggctccctgaggggtttatagagggtgggttctgccagctgcacgtccagtgtgcgtggtgagcaatgcccctgtggccaggtggtgtcctgtgcatcctggggcccctacttccttgctagtgtgtgttgaggctgattcacacctgagcttcttgacttgtgggggcccctgttcctacagctgatccttgtaggcgaccactgccagctgggcccagtggtgatgtgcaagaaggcggccaaggccgggctgtcacagtcgctcttcgagcgcctggtggtgctgggcatccggcccatccgcctgcaggtccagtaccggatgcaccctgcactcagcgccttcccatccaacatcttctacgagggctccctccagaatggtgtcactgcaggtaacggggctctgcccagggcaggggcttctacagagaagcggcatcaagggaatgtggactggggagaaggaactggcccatcagcttcccctgagcggcttcacatagccactgcttgaggtcagggcactttgtgcccaaggtcttgatggtatggtcttggatcaagtggtgtctctggggcatgtggggagcctgtgtcctctgtaaaactcagtcattgcctgagaattcatccaagcctcatgtggcagcatgcacagcagccaggacaggctgttaggggagctgagcccgggccttaacgtgggctgtgcattcagtgcttcatgaagaacagctgttctcagggcctgggcccctggggcccgcaagaccgtgtccggcttccctggataacacagaggcctcacctgccctttttcactctgctgacgctcacactgctggtgaccccctggtgcttctgcaagagtcagcccagagcagccagactgtgcccggatcacagtaagaaacgccctggatgaggaagtgaacagtacatcttactaagcctcgagtgtttcactgtgaccagataaaatttctcgtgacacctttgggtatgccggcgcttgaaggaagtccttgtggacacaccctgggtattcaccccaaggtgttgggcagactttttccaaaaatgatcgaacctgtcgcttcatggagaactagtggcaacatctgttacagtagtaaaattcaagtgaaaaccagaattttggaaaacttaacgtcgcttgccatgagcttggtgtcttcccaacacctagagacttttctggtgaggtctgtgggggtgacagatggaatgtttccaccattgccagtgaaatgtgtcagcctttggaagacctacttgactcggtgggagatccttcctgaatgaccagcagagtgtcacgaagtcacatggggatggagtggcaaagagttgtcacaggcctgcagaaacccacctttgtccagcttgatgtggcctcagggctggagactcccagccatgcagaaaggctgtaaaaacaaacccatctccctttccagcctcaggcatccatgaggcctggcttccccacagcgtccccagagcccaggagggtggactgagcagaggtggaccccagggcccagctgcctccgattcagccagatagtaaggagatttgcagaaatgggagacaggaccactcttcttacttagcttatttttggagaaataactaacacgtaatgggttatttttaaatgaattaatatattttttaaatttccaagtttagagaatacagttatccaataaacaaaagctgtttggactccctaacttttgagagtgtaaagggtcctgaaagctgccgacacagcgcctcatgaactccaaacctgtgaggttggtattgtcaggcctagttacaggagaaagtgaggctcagagcccaccccccgggttgggccacaccactctttgcctagcggtaggtcttgggagttgatgccactattgacatcgcagggacaccgctgttcccagcgcatggcaaggctgaaaacacaaggccacagagacctagcttgtgctctggggtgtctgagcactggctgggaaaggcgtggctcggcgcaggctcagacccctcatggtccccagggcatcggcccagagggcagacgctggtgcacactgctctctaattgatgcacagcacgtagttcacacccaggaagtacattttaggaaattctctattgaagtgtaaacatgtggccacattacaagtgtctggctcaatgagtggttactaagtgagcatatttggatagccagcacctgaacccagaaccacctgaccagctgtgagaagccgcctcatccctgcaggtggccactgtccaggggtgcgcatccacagcagcccctgggctgagggacttctgagctcatccggcggcccctgtgctcgctgtaacagcagtgatccacttggcctcattttcagctcgacgtgggatcatatgatgtgtcctggcgtgtctggcttcctctgtccatgtcaggctggtgctgtgcaaaaacaccggttttctccactgatggaagctcccagtagagtgaggagggcacctgtgaattgagaaactggttttacagttttaaggaaacgcaacagggcccagaaaagccaagatgagcatgaagagcccgaagaaagtggctgctcacatggcaggacgccccggcccccaagctgcagtgttgggccccggcccaggagggagcccagaggcagagccaccggtcaacaggccctcagcaggaatggacaaggctgcagggcagggggacactgttggctcaacagtgtcacacacaagtcagttgtaggggctgtggcgcctttaaggcaagcttctggaaggaagcaggagaatatcctgtatcctggggttggcagagatccaggctgcaagaaagccctggctgagaccctgttccctgttcaggggctgagccagctctgtgctggccatggtgctctcggtggcctctcctcagccttgcccaatcctgggcatctctggccaggggaccggctcaggtgacctcaccagggcctcacagatcgaagtctcctgccccaggacctgcagcactgtagcgtagcaactacattgccctgtgtctgaactcatttgaggcgggctagggcttttgaagtgttacttctttccctcccctcacagcggatcgtgtgaagaagggatttgacttccagtggccccaacccgataaaccgatgttcttctacgtgacccagggccaagaggagattgccagctcgggcacctcctacctgaacaggtgagcagggacaggcccaccggcgtctgcaggtcttggggacagcttgagaggttgttgacccattctacttatttttaacatgggactgaaactttttttgccttcatttcctgtttagcctgtttagactctaaaccgtgttgtttctgcctccttttccattgtacttgttttttattgggcagatacttgctaatcccacatggcagccgtttctgcccctcgagactcccctggtgaaggctggggaagctcagctgtgcaaacgccagtgatggcagctgccttcccgcagggtgttgtgtctgcacccctcacggcctccagcctcagggctcgggatcccacaggtggagcccagcactgacagcctgggtttcttaggaccgaggctgcgaacgtggagaagatcaccacgaagttgctgaaggcaggcgccaagccggaccagattggcatcatcacgccctacgagggccagcgctcctacctggtgcagtacatgcagttcagcggctccctgcacaccaagctctaccaggtgcgctgcgccctcgggcacacttggtctcctgggccatgcaagggtattgacccttgacctttaagttaccccccaagaggggcccgtcctggctggagctcagaatggcccaggaagcaccagctggcccaccctctggggagggcacagacagcacatccccacagaccctgcgaaattccacatgatcaggacagagactttgagaaatacatcacagggatcagaaacatgggctgagattggcacatcaaggtgttttctcgggatggttgaaacaagtccaaggtggaacggcagtggtctgtgcctgccacacactggatgttgtgctgtggagaccgtggtgttcacacctttattgacacccggatgaaacacccactgcgggtgtgtggggaggaggcacagctctgcctccatgaggaaatgagcccaagtgctgagtctgagtggccacatggcagtggtttctgttctgtttttgagcacggctcaggttctctgggatgagcacgtgtgctcttagtgctgagaaacaaatctccgtggctaaaagagaacaggctaggtgtcatggcccacacctggagtcccagcactttgggaggctgaggcagggaagtcgcttgaggctaggagttccagaccaacctgggcaacgtagggagaccctgcctccaccaaaaaaaaataataactgggtatggtggcatgtgtctatggtcccagctactcaggagactgaggtgggatcagctgagcctgggaggtcaaggctgcagcgagctgagattgtaccactgtactctagcctgggtgacagagcaagatcctgtctctaaaaaaagaaaacaaaacgaaatggcagcagagccaggacagcccctaggtgcggtgagcaggcgccaggccccaagctcccgggtgggatttgagggtgggtcttggtgtgtttcctgcattttggggggactgggaaggcagcctgctggctgatagtgaccacaaagctcccttccaggaggtggagatcgccagtgtggacgcctttcagggacgcgagaaggacttcatcatcctgtcctgtgtgcgggccaacgagcaccaaggcattggctttttaaatgaccccaggcgtctgaacgtggccctgaccagagcaaggtagggaggctgcctgctgcatgctgcccagccgctcatcggtcctcacttcccagggaatttggggctagggttgggggttgccagggccagaggtcagaggactctgagcagcagttgagaaacgatgtctcactggagagatctttgtttccgtgtcctgggggtttgctgtggcccctgtgcctcagcccagcaggacgtatttttccaggcccttctggtctgattcaaaataaatcttgtgtgtgtctgtcaagttgtttaatctgagaggctgtaagttttggtcctgtccactatttttggttctaaaatacaacttttgtgaactgatgatagcagaagggaccccgagaacaaggtgtccattctgtcatcccacataaaactagacatcaggccaggcatggtgtctcacacatgtaatcccagcactttgggaggccgaggcaggtggatcacctgaggtcaggtgttctcgaccagcctaacatggtgaaacctcctctctactaaatacaaaaaaatgagccgggcgtggtggcacatgcctgtaatctgagctacttgggaggctgaaacaggagaatcgcttgtacctgggaggaggaggttgtggtgagccgagattgcgccattacactccagccactgggcaacaagagcaaaactctgtctccaaaggaaaaaaaaaaacactagacagcaaggacccattcaccagctggaagttggggggacctggcctgtggctccacccagcacagggagagagcctggtgctccttccggctcatatgcgcggtggttctcctctaggtcaccatggctttgtcattggttactccctctttctaaggcgccctcttgtttggtgggcagtattgggtgggtccccccacagcttcgtgaggtgggctagaggagctgggcatcgggtcagtgccccggcctgctgggggccctgtggggccgcgtgtgccccggtgcctggaaggccgactctcttgacagcaggtcttctctccaaacgtatccacccagccaggtgtctgccatggggctgcttagagtcggccacaaaatcaacccgtgtgcagggtcagtggcttggcattgggctttggggcctgtccctgtggctggcagcctgcctgctgcccggtccacgcctctgttgccttggatttgggttctgagtgaatgcagccttgcctcttggaccgtcctgtgagacgggcagctctccacctgcgtcctcagcactgcgcccttgttgcaggtatggcgtcatcattgtgggcaacccgaaggcactatcaaagcagccgctctggaaccacctgctgaactactataaggagcagaaggtgctggtggaggggccgctcaacaacctgcgtgagagcctcatgcagttcagcaagccacggaagctggtcaacactatcaacccggtgagcgcctgcacaggacagcagggcagcacggagaaacccgggcccaaaacactgctgggaacgtgccagcttggcccgtgtgcccgtgagctgagggagggctctcctaggggagggtgggctctcctaggggagggtgggccagcccacttcttgtctcccgagccgtgtgtggcatttttggcttggggccgctaagtcctgggtggcctctgggaattgggctcagggctgctgtgctgcatgcagcagcctgggaccttggacacgggcagttggaagctttgcaagcccggggtgatctggtagtgagggggtgtgaagcttcctgagctgaggcccaagggtcagcatcagagcccaggtctgccgaggagggcaggcgagacccagaggccatgagacagcagctccctcctgtctccagggagagcccctggcacagtgtcaacacctcacagctgcatacctgccacctcccaggccaccgggcccgtgggaagttgttccttctgttgagatgacaaattcctcacctatctaaaccttcgcagggagcccgcttcatgaccacagccatgtatgatgcccgggaggccatcatcccaggctccgtctatgatcggagcagccagggtgagtcgctcagcaggggacctggccgaccccttgtcctcacaccgggatgctggccgttcccatggctgcagctttaggtgcccccatctttccttcccctcaagggcggtgcctggctcccttggcctccccgcccctagggcatctctagccccggaacactcctggggtgtttgtctttaaccagagtttattcatttgtgtttcctggtgatcaagctagttagctttttcttgccttttggtagggcagggactgcatgtagtacaaatagaacattttcataaaaaggattttttttttcctttggtaaatgcagggtgattttcatttattttcttttttttgtttagagacagggtctccctatgttgtccaggctggtctcaaactcctgcctcaagcagtccttctgctcagcctcccaaagtgctgggattacaggcgtgagtcactgcacctggccaatttgcaggtgtttttttttttttttttttttttggagaccgagtctcgctctgttgcccaagctggagtacagtggtgtgatcttggctcactgcaacctccccctctgggttcaagcgattctcctgccttggcctcccgagtagctgggattacaagcacccaccaccatgcccggctagtttttgtgtttttagtagaaacgaggtttcgccatgttggcctggctggtctcaaactcctgatctcaggtggtccacctcggcttcccagagtgctgggattataggcttgagccaacacgcccggccccaattttcagtttttaagatctgtgtaggccaatgattcccagcagactctcctcggggaaggtgcctgcccaagcacccagccccaggcaggctgctgtagttaacatggagtcctgcgaatccgcatcttcagcctgggcagagccaggacagatgtgcagctccggctgactggctggtggggtgggtggggtatcgctggggtttgaccgaggcaggtgacacctgccgtgttccactgtgatttgcaggccggccttccagcatgtacttccagacccatgaccagattggcatgatcagtgccggccctagccacgtggctgccatgaacattcccatccccttcaacctggtcatgccacccatgccaccgcctggctattttggacaagccaacgggcctgctgcaggtgagcatctgtggctgcggctgggtgtggccctcctgagagctcttgagggtgtgcttgtctgcgaggccctggcctccttcggatcaccctggactgctgtctttcagggcgaggcaccccgaaaggcaagactggtcgtgggggacgccagaagaaccgctttgggcttcctggacccagccagactaacctccccaacagccaagccagccaggatgtggcgtcacagcccttctctcagggcgccctgacgcagggctacatctccatgagccagccttcccagatgagccagcccggcctctcccagccggagctgtcccaggtgagcccgcccctgggacgggacttacctgagtgagggtggggctatgcacctgaaacattccctctgaagagccccagagagctggcctggcccatgtccactgtctgaattacctgtccctgggctggggtcatcagagtgggtctcctgggtcttagtttggggacgggttttccattcttttctctggggctgctgagggctgggtggatgtgagcacccttggcctgtggcttgcttacctcctgaccttgtctttcaggacagttaccttggtgacgagtttaaatcacaaatcgacgtggcgctctcacaggactccacgtaccagggagagcgggcttaccagcatggcggggtgacggggctgtcccagtattaaaaggcaagcccccctggagcaggcctggccccaccccagcctcaaggagaaggatgggagggggctctccccagggagctgcactggaggggtggtatctggaaatgtgtgctgtgcctggtgggggtcataggccctcagggccagcttggcctgtgcccttcactgctagtcagggtggctcctcaccccaccctaccccatcctgtctgctccggggaccaccgcgggacctcagtttcctcatcagagtcggggagggcagctcgggctctccctcactgtcctgtgtgctgggtacctgtggggctcaggtcgcagcctctcaccgcctcctgcccttctccctcctgacaggtggcggcggaagagctaagcaacgtggcttagtccatcagcatcttattctgggtaataaaaaataaaaataaacggatacctgttttccactgctaaaactgaagcaccactgtgtgagcaacaggaagggagagcgcacgagggagaggagccgaggccgagcgccccctgctggcccgcggcggcgaggagcagagggagcggaggaggggccggcccgcgggagccgcggccaccaggaggccccgctccgtcccatcggggctgcggccagggcggagggaggaagaccctcatctcagagtagccctttcctctgttcttttatttctttttctctttgattgaaaggggactacgtcttagcaggaaaaaaaacttcgcatttctgtgcccgagcaggctccttgcaaagacagcagcgtgcggggcagagccccgggagggcgcgtctgtccacgcctaccggacgcgccgaggtcgcgctgcctgtgttctccgagggccttcatttaaagaaaataagggtgttttgggtttttctctttgtttttttcaagattcttttaaaggagtactgaagaatactttcctaagtttgtctgtaaaatcttagcggtggacctgggagatttgagaagcttccagaaacagtttaaacaagccagcgctactggagaagaggagcaacacctgtgccgcggccggaggagttttgttgttggttttagcttccagtggcttctttctgcggggcatcaggctgctggggtagccgcccgccgagcctggaagctgctcgttctccgctggactcagaagccaagctgcttcccgcctagactcggcgcagggccccgcaccggtgaggaaggtgcttttggccccattgcgaggggccttggccaggactggccctgtggccaggaggcgagaaggtggctgttcccggattgacggctttttcccgggggcctttggaagatttggtggaaggacaagagggcctgtccctgtccccgtccccaggaggtaccgacagtccctgtgctggttagacacggagcgctgcacaccgaaagcccaaattgggagctctgcctgccggcaactttgctgatggggtgattgctgcttctggggggtaaggaaacaagttacagaaattaccgcgttctgtgtgaagggactgagggtgtggtgtcattggcagagggtcattttaggagagctgccccagcccctcgaacgcctggcttggggtgtcattctgcctggcggccaggcctccagcttcccctgccccgggcctggggctgtcactggccctgatccgaacacctccagattccggcttctacatgggacagacggggacgcacaggccaccttccttctggcagggactcttatttattcccattgctctagggctttcggtttccccttcttccggtaggccgcgtagaggcatgcaccgggtaggtttccgcggtgaccccgcggcggcctgagggacgctccctgccccatcccggctgttgggctgggccgctttgcctctgcttcgccctgtgctgtgttctccagctttgtagcagcagccttgacaaacccaggcgcactgtaccaaggcaatgtaacttttgattttcggtcaatttaagttcttttgtcaccaaatattaataaacagttttgacttcacaccaaggttggataaactgcagggggtggagggtgctggggttttgccttggctgagtgacgggttggggtgtgaaggaggccagagggagacaggcaaagcccagaagggacaggtctgccttgcaggactgaagggcgacccctgcccctgggcccttcccgtaggcagcacctgggcctgtccgggcggctccccggagtggcgcgttaggcctctggcaggtggcctggaggtggaaaggcctatccgatcaccaagactgaggggcgccctccccaccacccaggcaaggagtccaaggagaccagcggagcagaccacgcggcatttattgttgggcccgcgtccctgcccgccccgggttagcggcagccgcactcgtccaccaccatgtcctcatactgccgcagcaccacgttgtcgctgttgtcaaagaagagcacggagatgggcgacaggcgcgcgggcacgcagcagggcaggtcggcggctcccggggcggccgcgtgcatgagcgcgcgcagcacagcgtggttgagcgccggcggccccccggaccccgacagcgcgacgggcagcgcgcactgaccctggcagtagttggccaggaagccgcgcggcgcgatgacccagcggtgccagcccacctcgcggaagctcacgtacagccgccgcgcgcgacaagcgcccccggggccgccgcccaacacgggttcggcgtcgcgccgcggccgggccagggggtggcacaggcgcgggtcgagggtcaccagcagcagcgaggcctcggccaggcgcgcgcaggcggcaggggcccgggggcgtagcgccagcgccaggcggaggctgcgcggccatgaggcgttgcgagcccaagcggcgcccagcagctccgcgcgcactggcggccccagggcgggcaccaactggcggagcagcaccggcccggggtccgcgcccgcgccctggcccgcttgcgccacgctcagctcccagccgccctccggggctgccgccgccgccgccgcgaaacgcagctccaggcgggcccggctcgggcgctcagcgggttccacagccgacaggtcgaagacgactgtccactcagggcaatgccccgcggccgaggcaggctccgaggcccgggtgggcgcacctggggaggtaggaacaggaactcggctcgcgctgcgtccccggcctgcccatggggtctcggttagggacagggaggaaggtgaacgctggggctcggggcgcaccgtctgtgggaagggtgtgaagcggcggggtgggctgatggagtgggggcagggcatgagttccaaggaaggcgccctgcggggtgcggcggggggggtgggctgccctcggcggggggcataggaggaggggtggccgaagtgggagacatgagccagaacctgggcccctggggaagccatgctagggtgtggggatggcatctgcaggaaggcattagtgtcaagaggtgggggtgggcatggggtggggacagggcttcagcatcaagcagaaggactggtcttgggaaccccctgacatgtgtccccggcgtgcagcagatgacgaggaaagggtgaggtgcggtggccgaagttgctagtagcctggacagggcgggtggggaccctcggagctgctcgggcatccccgggccactctcgaggctcgccctgcgaggtctggcctccaggaccagtgtccccagcgaaagccccactcaccgcggtccgggatgtggcgcacgatgtttccggcgacccccagctcctccacgtggcacggttgcagggtgacccctggggacgtccgccgcgagccagacctggtctcctgggggtcccggcgtcgaaacaggcgccacatgaccgggggaaccggccggagcctgggggcaccctggggctcatcgcgcagtcctagagcctggagcagggcggcggctgggcctgggggcacgggggcgcgggtcaggggcagcgagggcagcagcagggccaggaggaggaggaggtggtggccgcagggaccttgctgcggcggtggcatcttcctcccaggcgatgaccagagagtgcgcagggtccgcggcggcccgggaccagtgggctgagggcggggccggtgtccccggaggggcaggggtcctggggggcgtggccgggaactggaggcaggatgagggggcggggtcccaggggaggtggcggcggccctagaggagcagagttggagggggtggaggggcggccaaggacggggagcgtggccggggtattcggggtggggccgggtccacgggggcggggccgaggggttcagaagcgcttgtccttcaccaggccgttcctcagtggcttcctgggggtcagaaccggcgcaggttagcctgggagccccacgcggccgcctggccctctttcccgcttcttctctggccgtttcacaccccctggctccttttacccggccaggcccgggcctcgccttgtggcttcctcctcgccttcaccctgcccctccttgccttcaccctgcccctccttcaacctgccccgtaggcacgtatgtcccccctggcaccctggcacttcctccttgcttccccctctccaattaaaccttcctcttcccctcctccctgcctctccaggccgctggagggcaaaacccacgtaccggcctgggcctgacaactccaccgcctccacagtgggaccctgcacatcctcctctcctctgccacccaccccacgaaggctagtccttgactccagtggccctggctggcatctgctgtctccacctacttcccttccatgttcttttattttccttttttttttttggtcttactctgtggtccaggctagagctgtggcacaacctccaaggctcaatggatcctcccacctcagcctccagagtagctgggattacaggggcacgccaccactcccagcaatttttttttttttttttttttgagacagaatcttgctctgttgcctagtctggagtgtggtggcacaatctcagctcactggaacctctgcctcctgagttcaagcgattctcctgcctcagcctcctgagtagtgtggtggcacctgccaccacacccagctaatttttgtatttttagtagagacagggtttcaccatatcacccaagctggtcttgaactcctgacctcaggtgatccgcccaccttggcctcccaaagtgctgggattacaggcgtgagccaccgtgcctggccccagctaactttttttattgtttgttgagatgaggtcgctatgttgtagaggtgaggttgctatgttgtccaggctggtctcaaactcctgggctcaagcagtcagccctcctccgcctcccaaagggcttctgtcactttaattcgctcttctcttaggctgaagctcagcttctctgcatgcatttcacagccaactggctgtccccatccaaggactgttggtctttatctgagaggagataagccttgcttggacctcccatctgtcacttgtcttctgattttgcctgtgatccttgagaccgtgagtggcgtttcttcatccacccttgtggcttctcgattcttcccataaacaaacctccgtgacacactgtccccttttggctctgggatgactccagggattccatttctgcatcgacacctttggtataaggtgggggtttgccctaaggcttatgggaaacaaagacacaccctcactgtgttttccagagggtccccgtgctttccattcctgccctccaggatggtctttagtatttgctaaaggttttaaggtcttaggttagtttctccactcagttcccacagagagtatagattcctctaatggtaaagtttagcatcctcggtgatgggtgcccccgccctggggctttttatcagagctttcctgctgattcttgtttgttttttctgcaaaagcttcaaagtgttctctacccactcagaaacagctgtcagtatttgccttttgaggtgtgggtggcggtgtacccaccttgggggagatagcttttctctgttatctttttttcttgttttgtttttttttgagatggagtctcgctctgtcgcccaggctggagtgcagtggcgcaatcttggctcactgcaacctctgcctcccaggttcacgggattctcctgcctcagcctccccagtagctgggactacaggcatgcaacaccatgcccggggtaatttttttttttttttttgagacgaagtctcgctcttgtcccccaggcgggaatgcggtggcacgatcttggctcactgcaacctctgcatcctgggttcaagtgattctcctgcctcagccccccaagtagctgggattacaggcgcctgccaccacgcccagataatttttgtatttttagtagagatgcggttttaccatgttggccaggctggtctagaactcctgacctcaggtgatccacccgcctcagcctccaaagtgctgggattacaggcgtgagcgccgcgcctggctaatttttatatttttagtagagatgggatttcaccacgttggccaggttggtctcgaactcctgacctcaggtgatccatccgcctcagcctctcaaagtgctgggatttatgggcgtgagccaccatgccgggccgagatggccttactctgatggacaccttttggcttctatccaccactgtggtgaaaagagccagagcgagtgtgcagagagagaaggatgatgcaggcactttctagatgtttcttcatagatgaggaggagagggagacagaggagacaagaccccctgggctcttgcaagggttttgccccaaattgctgtcaacaccgatagactagtgttgacactagtctatcactagagagggagtctggggtgaaattgggggctgatttgagatattttagaagatgctggaaatgtcaaacacgggagatggagaatggcactcaggggagctgcgtggctaggagagaaatgtaggagtcggtgtggattaagtgtgggtagagaaagggccccagaagagaaggaggccagccaggaggccagagagacagagcaggagtgcagagtaaataaagggcttcaagggccaggcgcagtggctcacgcctgtaatcccagcactttgggaggctgagtcaggtggatcacctgaccctaggagtttgagatcagcctgggcaacacagtgagaccccatctctacaaaaattttaaaaattagccggggccaagcatggtggctgatacctgtaatcctagcactttgggaggccaagatgggtggatcacctgaggtcaggtgttcaagaccagcctgggccaacattgtgaaacctcatctctactaaaaaaaatacaactattagccaggtgtggtgtacacgcctgtaatcccagctactcgggaggctgaggcaggagaatcgcttgaacctggaaggcggaggttgcagtgagccgagatctcaccactgtactccagcctgggtgacagagcgagactctgtctcgaaaaaaaaaaaaaaagaagaagaaggggaggggactctctggggttagcaccaagagagccacatgggagctggacaggagtggtcttcgggatggggggaggaagatggggcacagctgggtttgaggaggacccaggaggatctaggaattctgctacaagggagggaaaacaggctgatgaggccagtggtggagaagagcagagagcacgttctctcctgggttgaaatgtccttgaataggcaagctgggtgaacatccctagcctcagagagagggactgttgtccactgtagcagcagctggacatcctcacccggccacttctgctttcttggggacatgttggccagattatcagtgcaggagatgatgatgatggggacagctggtgcccaggaaccctcaggagagaagatgctcctacatgggccagatgtaggtgctgaagttcacagttttctatttttattttttgagacagggtcttgctctgttaccgcagctggggtgcagtggtgcagtcatggctcactgcagccttgacctcctgggctcaagccatcctccagcctcggcctcccaaagtgctgggattacaggtgtgagtcaccgtgcccagcccagttctttagaactgctgcaggggcagtggcaggtgcagcagaggtgaaaatgggatttacggagcattgagtgcaggtcaccagatccagagagaggtgagagtgtctcaacggatggccggtcccggcagcccctgagagggcaatggggactttggacagaggggctgagtcatgacaaggacatgggagtgaccacaaggaagctacgggcgtcagtgtaggagagaagggtactggctacccacatcaccaggggtcccctgagggccatgaggaggacagggaattcaggggaaggggtacagatgaggggaccctggaggtgaggctgctcaagaagcagcaatggggtgagatggggtgaggaagagatcaagccaattaattgctctctgatttgcttcacgcctcctgagttacctaaaagtggttctcggtcttggttttctgaagggttccaatcctgattgaattttcggaaccaggcaaagtggctcatgcctgtaatgccagcactttgggaggctgaggtgggaggattgcttgaggccatgagtttgagaccaaactgggtaatatagtgagatctcgtctctacaaaaacactttaaaattagctggatatgatggtgggtgcctgtggttccagctacttgggaggctgaggcggcaggatcacttaagcccaggaggttgaggctgcagtggactatgattgagccagtgcgctccagcgtgggcgacagagtgggaccgtctctaaaaaaaaaaaaaaagaaagaaagaaacaggctgggcgcggtggctcacgcctataatcccaacaatttgggaggctgaggcaggaggaacacttgaggtcaggagttcaagaccagcctggccaacatggtgaaaccccatttgtaaaaatacaaaaattagctgggtctggtgacacacgcctgtagtcccagctactcaggaggctgaggcaggagaattacttgaacctgggaggcggaggttgcagtgagctgagatcacaccactgcactccagcctgggcgacagagcgagacactgtctcaaaaaaaaaaaaaaaagaagcttttggattcaactgttaaaacggtaatccacctggaatcctctctctgctgtggagagctttcttttattaaacttttgctccaacctcggcctttgtggccacgttccttaattttcttggtcatgagaccacaagctcagacaacaccttagacaacaagaccagtgaccctgacctgcttcaccatgataagtgtccttatgagagagaagagagacagaaaagaagaagagaaagccctgggaagacggagactgagactggagcaatgcagccataaaacaagaaatgcctggagccaccagaagcccaagaggcaaggaggggatcctcgcttagagttcccagagggagcaccgcccagctgaccttgattttgaacatctgtcatccagaaatattagagaataagttcctgtggttttaagtcacaagcttgtgttccttttgttatagagttcctgggaaagtaacattcaatgcctttttttcactgcaacctctgcctcccgagttcaagcgattctcctgcctcagcctcctgagtagctgggattgcaggcgtgcgccatcatgcctggataatttttcgtatttttagtagagatggggtttcaccatgttagccaggctggtttccaactcctgacttcaagtgatccacctgccttggcctcccaaagtgctgggattacaggcgtgagccaccgcgcctggtcttcaatgccatttttgatggtctctcatacctgtttttaaaataaacttttttgtttgttttggtttgtcttttttctttgttttgagacagggtcttgctctgttgctctggagtatagtggtgtgatcacggctcactgcagctccctggcttaagtgatcctcccacctcagcctcctgagtagctgggactataggtgtgtgccacaacacatggctgttttttgttttgttttgttttgattgggttgtgtgtgtgtgtgtgtgtgtgtgtgtgtgtaggaactgcatatccctatattgcccaggctggtcttgaacacctggcctcaagccatcctcctgccttggcctcccaaagtgctgggattacagacgtgagccaccacgcctggccaaacttttttattttagattaattttagatttacagagatgctacaaagggagtagagggagctcctgtcacctccatccagctcccctgacattacagcttacatttccatggcacatgggttgcagctaaagaaaccgacattggtgctttgctattaactaaactctccacatgatttgaattcaccagcttcttggtgaaggtccctttcctggtccaggagcccatgctgcaggtggcatctgtctccttggtctcctctgaccctggattgttcctcggtctttccctgattcccatgatcttgacagtttctgggcatcctgacgggctcttttggaagacgtctctcagcctgactgccttcgtcccatcctgttttatacccaactgcactaactccggctgtccttggagaatcgaattctgctggtggtgcctatgggatcaatcatcacagggtgttccctgatactctctggcacttctgtacagggtgcatgctttgctgtcctagaggacatgccagctcttaccctgtgttctgatgagacatcctcagcggggacagagccagacactggtggggctgggaggtctggcttcctcttgttctgggttctgcacctccgaggatgtccccaccatgagctcactgttctacagcaagaggaccttcctggtgtctagatgtggccaaactggtgccccctttagccatcgccacctttggaagactccttggagagacctagctgatctctggagaattcccgactcaggccggctgcagtggctcatgcctgtaatcccagcagctttgggaggctaaggcatgtggaccacttgagcccaggtgtttgagaccagcctgagcaacatgaggaaaccccagctctacaaaaaatacaaaagttagcacagcatggtggtgcatgcctgtgggcccagctacttgggaggctgaggcaggaggatcacttcctgggcctgggaggcggcggttgcagcgagccgagatcgtgccactgcacactccagcctggacgacagagtgagaccctgtctcaaaaaaaaaaaaaaaaaagaattcttgactcatgctcaaaggacagcgcaatctaacaccctcaaaaggaggctcctaacgccgcatctgccagaacccatgtgaccctctgccccaatcccatctcagtcaataccagctcgagccaaaagtcttgagtcgtctttgattcttttatttctgtttcatctacacccaaggcgaatctgatgggttctcccttccaaacagggtggggggtctgacgctcctctgcctggctacagccccggatgtgttaaatgtctgcatctcgcacctcccgttccaaaaaacgtcacggagctctgagccactgcttccctgaaaccatcgttcccacgtcaccgatggcccccaccggccaaatcagagggcctggctggtcggcaccttccagggccttccacaacctcctgccccggctcctgctcaaacactcctcacgttgcctatgagacactgcacacccgactctgcttgttacccagtttggcctccgttcatccctggcccagacaccccctgcctgccccaggcctggggcttcggacaccatctggctgtcacccagggctggtgaggctcgtgggctatctccttccccaggactcccacctgggctggactgagtctgagctcccagccccagctcctgtttggccgggcagtgggctcccctgtcaaactcagaggccaggatgtctcggcccagatggagcctgggttctctctgtggcccttggcgttccttcctccccagccccactgccaccagctccagtggcgacatgggtcagaggtcgtcatccaggctggccagcaactactcctcaccacccacagggccctggctcgccactcccgccacaccagccactaggcctggccctcagtgtccctaccgctgagaccctgcctgtcgccctgcctgcccctccccagcctctccctccccttcctcactgtcctgtccttcagggtactggccacatcgtccacgcctttattgcagtctctgttttggagtaggcttggggggcagcatccgcgtcggcctcatctgctgctgggtcttgggggcctgcccacgaacacgcttggacgggtgacactaaaggagggaacgcggggtgcgggcccctccacactcactcggctttgctgggcttcaggctctgggcctcggctgtgtcatactcccgcaggtccttcagctcgtgcacctggcctgtcaacaccttggctgcaaacgccacgatgtactgcgagaggggaggggaggtgccagtgagaagaaagcccccacgccactgccctgctgacagccatgtgctcctgtcccgggccctccacacgggctgtctgccacctaacgtgcccctccccgggactgcctgaggaggggacagggattgggacgaggacgggaccgccactgtggaggagagccggggccgactcaccaggaaccagtagaggttcataagggtgagcagcagcaggagcgcattgaagaagaagtagaaggggatgtcaggcaccgtgcgcagactgcagtgactggtggcatacaggaccttgagcgggaaccagtagaggcggaaccagaacctgcggtgggaggagtcaggaggccgtgggtggagggggacggtgccctacccagtccctgtcctatcccgtcctagacccacccttgcccccttatcccatccttgcccacctctgcccacctgtttctactactgctctgtccttcccctcccctgccatgccccgcccacctcgccaaggccccacatccttccccgcctggccccccacttccctgccaggcctcacccacctcgccaaggccccacctcctccccttcccagtccctccccttctctgctaggccccacctacctcaccaaaccccacctccttccctgcccagtccctcccctttcctgccaggccccacccacctcaccaaggccccacctccttccctgcccagtccctccccttctctgccaggccccgcccacctcaccaagcccccacctccttccctgcacagcgcctccctttctctgccaggtcttccccaccacaccaaagccctacctctttctctgcctagccctaccccaaccctgcttggccccacccctggcttgctctgtattagtctagctcttccccttccatgcctggcccaacctatctcaccaggcccctccccttcctggatccacccacctcacctggcttatccttttctgcccagccccactcctagctcagttggccccacccttgtcctactcctttcctgtatagccccgccccttcagtcccacccaaatcatgaggcccctcccctgtcatgccacacacccacctcaccgggccccgcctccttccctgcctggtcccgccccttttctggacacacccacctcaccaggccacacctccctccctgcccagcactccctaccactcaccagctgaagccgaagctgaggcagcccaagtctgctgccaaggcatgcagccgatggtaggagccgccgcgggacttgaagtaaatgttgagcttggtgaactcaagctgcacgtcactgatatcgtgcaggaagagcacaaggatgcccacattgtggtacctgggggagcagcaggcagagaggagagggcagctcacattgggggacctccactctgcactaaggcccccagcagagtccctgggctacacctcaggctccccgtgggcctcttcaaagccacccttcctgcctcgcctgccctgcccatctccacttcccaggatgccctttcctcactgtcccccacttagccgtgcacccccaaccagaccctcatcttccctgcctcagtgtccccatgtggcccagggagctccctggaagtttatttttcttttgagacagggtcttgctctgtggcccaggctggggtgcagtggtgtgatcgggcccactgcagcctcaaactcctaggctcaagtgatcctcccacctcagcccccggagaagctgggactacaggaaagcaacaccacacacggctaatttttttaatttttagtagagactgggtcttgctatgttgcccagaatggcctcaaactcctgggctcaagcgatcttctcaccttggcctcccaaagtgctgggattacaggcgcgagccactgtgcccggtcttggaagttccttgctggcccctcctcatcttggtgacctctgaccctctatgacccccgactctcacaggcctggggtactctgtgtccagatcctccatgagcttgtccctcactttggacaccaccaccatgatgagacttccaggtctgtacgtgcagcctggccatcgctgcaggaaaggcctctgccgcagcccatcaggatcctttttttttttaatttttttttttttttgagacagagtcttgctcttgttgcccaggctggagcgcaatggcacgatctcagctcaccgcaacctccacctcccgggttcaagcaattctcctgcctcagccttcccaagtagctggcattacaggtatgtgccaccacgcccagttaattttgtatttttagtagagacggggtttcaccatgttggtcccgctgatctcgaattcccaacctcatgtgacccacccgccttggcctcccgaagtgctgggattacaggtgtgagccaccgtgcccggccccattaggatcttaataagcccgaaggccatcccctgtccttccacagagtctccatctgacagatgagctgcccgagggtcctggattcaccctggacgtggggaagtgtctctcaccaagtccctgttccttgctctgtctcctgacagctcctgggctcctgccacaggtcctttgcacgtgctgtccccatgacccagcatgccagtgcctggcattcagcacctcccttcactcctttcagtctctgctcatctgctcatctgtcacccccagaccaactaacacctaacacctgcagccacaatttttttttggagacacagcctcactctgttgcccaggctggaatgcctcggctcacagccacctctgcctcccgggttcaagcgattctcccacctcagcctcttgagtagcttggactacaggcactcatcaccatgcccagctaatttttttatttttagcagacacagggtttcaccatgttggccaggctgttctcaaactcctgacctcaggtgatccacccacctcggcctcccaaagtgctgggattacaggcatgagccactgcacctggccttttctccataattcttatcaccttcaaatgaactgttccttccttcctttttggttctatcatctgattctgccctctagagagccttgaattatagaactttctagaactatgggaatgttctaaacctgtactgtccaacatgggagccaccagccacttgtggccactgagcccttgaactgtggcttgtgtggctgaggaatggaataggggctttttaaaattattttttaaactaaccagacgtggtggctcacacctgtaatcccagcactttgggaggccgaggcaggtggatcacttgaggtcaggagttcgagtccagcctggccaacatggtgaaaccccatctctactaaaaatataataattagccggtgtgatgtcatacccctgtaatcccagctacttgggaggctgaggcgaggcgggaggattgcttgaacctgggagccggaggttgcagtaagccaatgtcatggcactgcactccagcctgggcgacagagcgagactctgtctcaaaaaaataagtaagtaaataaataagataaagtaattttaaaaatgtatttatgtacgtgtttgtttatttttgagacggagtctcgctctgtcgcccaggctggagtgcagtggcatgatctcggctcactgcaacctccgcctcccgggttcatgccattctcctgtctcagcctcctgagtagctgggactacaggcgcccaccaccacgcccagctaatttttgtatttttagtagagacacggtttcactgtgttagccaggatggtctcgatctcctgacctcatgatccgctcgcctcggcctcgcaaagtggtgggattacaggcgtgagccaccgcactcagcctaaaaatttatttattagagacagggtctccctacgttgcctaggttgaactcaaacttctgggttcaagcaatcctcctgactcagccttctaagtagctgggggactacaggcatgagctactgctcctggagttttatttaagtctaattaaagttgaaagggccacctctttgttgctctatatttgtggggcgtggctaccctattatcgcagctagagcagctagtcccgtaggaatagtatatgagcagtgtatttcattttaaagtttctattggccacatttaacaagaaagagaaaagaacaggtaatattaattttaataatgcattctaattaattcagtatatccaaaatattgtcatttcaatatggagtcgagataacaaggccaggcgtggtggcgcacacctgtaatccccacacttcggggagctgaggtgggaggatcacttgagcccaggaggtccaggctgcagtgagcaatggtcacgccactgcactccagcctgggtgacagagtgagaccttgtctcaaaaaaaaaagagagagagaaataaaagggtggataagatattttcactcgtttgtatgtgaaggctttgaagccgggtgggttttatgcacacagcatggtgaggtttggacagactccatctgaaaggctcactgacggctgtggttggctctagaacatcagggtgtgtcagctgcgttcacagccatgcccccattgcttgggcgtggcaggtgctcaggaactcctgggtgtgtgacctggctggtcaagggcagcgtctgaagagctgggtgggtgagtggggtggggtggctatggctctctgggcctgtttcaccccatcccagcggaatctccctcaggaatctccgggcccacatcccctcctcagccttcctgcctctggtctgtcccctcgtcggacccctgagcactctgaccttggaaccctgagcactccgacctgatgtgatcccctccacggcctcctctgtgccccgccgcaacatcagcctccgcactctgtgtgggctgtgcctcggccccctgccacccgatcctgtccttaccggaaggcgtaggaggagacgatgaggatgagagtgaccacgtggtggagcagcatgaccaccgagtccttgcgccaggtgtccatgtatagcgtagcgtagatggagtggccatagaagcttccctggagcaggtaggcggctgcaatgtcccgtggcactgccatgcccggcgtccagtctggggagagccaaatctcacagtcagggccctgcgaagcctctagacgatcgcctccatgacccggtgacaccctccaagccacacgtgtcctcccagtacccaggtaaccatgcgtgtctgactgctggctttccattcccaattctatttttttttttttttctttgagacggagtctccctctgtcgcccaggctggagtgcagtggcatgatctcagctccacatcctgggttcaaacgattctcctgcttcagcctcctgagtagctaggactacaggtgcatgccaccaagcccggctaattttttgtatttttagtagagacggggtttcactgtgttacccaggatggtctcgatctcctgacctcatgattcacctgcctcggcctcccaaagttctgggattacaggcgtgagccaccccgcccagccgtctttttttttttttttttttttttgagacagagtctcgttctgtcaccagactggagtgcagcggcacgatctcagctcactgcaacctccacctcccaggttcaagcaattctcctgcctcagcctccagagtagctgggattacaggcgctggacaccatgcccggctaatttttttgtatttttagtagagatgggcttttgccatgttggacagactggacttgaactcctgatctcaggtgatccacctgcctcggcctcccaaagtgctgggattacaggcgtgagccaccgtgcccggccagcagggatttttattttaggaagagttttgggtttctaggaaaattgagcagataggacagaaagttcctttctttcttctgccccaacatacccacagatttccatttccctggctttaagtggtatatttgctacaaatgctgaactaatatagacacattattatcattatatacatttaaaatgttttatatatagttttagagttggcttgttctgtggcccatgctggagtgcagtggtgtgatcatagttcactgcagcctcgacctcctgggctcaagtgatcctcccacctcagcctcctgagtagctgggaccacaggcacccataaccatgcctagataatttatttcttttttaatttttgtgttgccatgttgcccagggtgatctcgaactcctgggctcaagcaatcctcctgccttggcctcccaaagtgctggggttacagggatgagccacctcacccagcccagcgccccttctcgttttttttttttttttttttttttttgagatggagtcttgctctgtagcccaggctggagtgcagtggcgggatctcggctcactgcaacctccatatccggggttcaagtgattctcctgcctcagcatgccaagtagctgggattacaggcacccaccaccatgcctggctaatttttttttttttcagtagagacagggtgtcatcatgttggccaggctggtcttgaactcctgaccttgtgatccgcccgcctcggcctcccaaagtgctgggattacgggcgtgagccgctgcgcccggcctcttcctgtctttaacagagccctgccttgcgggtgtcctgggcccactccctgcaaatccctggccctgacagatgcggctgcccacggagtcttgccatgcccgggcacaccatgccaccaagcgcagggtctcccgccaagcgggtcctgcctcaccttcccctcctcctgcctcctggtgcacctgaccaccacgctcaggtgatgggtgacacaccagcccaccccaccacgtccacctcctcctctcctcagccacatccccagaggctgccagacaccaaattcaagggctatgctctggacgggcacggtggctcatgcctgtaatcccagcattttgagaggccgaggcaggagagttgcttgagtccaggagttcgagaccagcctggacaacatggtgagacgctgtctctgcaaaaaaatatataaaaattagctggggccgggcgcagtggctcacgcctgtaatcccagcactttgggaggccgaggcgggcggatcacaaggtcaggagatcaagaccatcctggttaacacagtgaaaccccgtctctactaaaaatacaaaaaattagccgggtgtggtggtgggcgcctgtggtcccagctactcgggaggctgaggtgggaggatcacttgagtcctgaagggaggcagaggtggtggcaggaactaagatgttgccactgcactccagcctgggagacacagccagaccctgtctcaaaacaaaacaaacaaacaaacaaacaacaaaaaaaggcgggaagccatgctgtgctctgcccacaccaacctggaactctctgggttgctccctgttctctggccactccctttctgcagacccccaagacagaccctccagcctccatctgcggcttcctggcccctgccttggtgacctgccctgcagcccagctgcctccagatgccccatgaaccgcctctgcgacaactttcatctcggcctggccccttctgcagccgagttacactaggacccccatccagggtcccctctttggcccatgccacccccaccccagtccaggcactgttgtctcctgcccacatctctccagcgatccctggcccccatgactgtttgtccactctcctcactcagccctgaaggccatgtacacacaaacggtcaccatgacccagcaagtccactagggtgtgtgcctgacaatggaaaacggggactcaaagagatactcatgtgtccctgtctacagcagcacacaaccaaaaggcagacacaacccgaatgtgcatcagtggatggatgaagaatagataggttacctccacacagtggaatactatgcagccatgaaaaagaatgaagcacggatccatgctacaatgtgggtgaaccccaaaaacatgatgctgagtaagagaagccaaacacaaaaggtcacacagtgtgagactccagtgatctgaaatgcccagaacaggcaaatctacagagataggaagtagattggtggctgccaggggctgggggagaggactggtgagtgactgctaatgggacggggtttccttttgtgggggatgataatgttccagacctagacagagggggtggttgaacaacactgtgaatggactaaaagctgatgaactgttcgctttaaaatggttaatttttggccaggaggtggaggcaggtggatcacctgaggtcaggagttggagaccagcctggccaacatggcgaaaccctgtctgtactaaaaatacaaaaattagctgggcatggtggcgcatgcctgtaatcccacctactcgaaggctgaggcaggagcatcacttaaacccgggaggcggaggttgtggtgagccgagatcacaccactgcactccagcctgggcagcaagagtgaaactccatctcaaaaaaaaaaaaaaaaaattgtgttaagatttatatggcaaaaacttaccatctaagccatttgttaagtacacattattgtgcaaccatcaccagcagccatctccagaacattctccttcttccccaatggaacagtcctctgtccccattaaacagtctctccccattcccctcccccagccctggcaccccccatcccactttctgtctctatgagtgggatgactgtaggaacctcatataagtggaatcacatagtatttgtctttttgtgattggctaaaatgcctaatttcaagctacatacattttacctcaataagaaatggaggccaactgaggtggctcacgcctgtaatcccaccactttgggaggccaaggtgggtggatcacttgaggtcagaagttcaagaccagcctggccaacatggtgaaaccccagctctactaaaatactaaaattagccagacatggtgatacacacctgtagtcccagctattcgggaggctgaggcaggagaatcgcttgaacctgggaggcagaggttgcagtgagctgagatggtgccaccgcactccagcctgggtgacagagcgagactccatctcaaaaaaaaaattagctgggtgtggtggctcgtgcctgtaatcccagccactcatgaggctgaggcaggagaatcccttgaacccaggaggcaaaggttccagtgagctgagatcacaccaccacactccagcctgggcgacagagtgagaccctgtctcttaaaaaaaaaaaaaaaaaaaaaaaaaaacaggctaggtgcggtggctcatgcctgtaatcccagcactttgggaggccaagggaggcagatcacctgaagtcgggagttcaagaccagcctgaccaacatggtgaaaccctgtctctactaaaaatacaaaattagccgggtgtggtagtacatgcctgtgatcccagctactccggaggctgaggcaggagaattgcttgaacccaggaggcagaggctgtggtgagccaagatcgtggcattgtactccagcctgggcaacaagagcgaaactctgtctcaaaaaaacaaacaacaaacaaacaaaaaaccctcccctattccagaatttctttctttcttttttttttttttttttttgagacagagtcttgctctgtcgcctaggctggagtgcagtagcatgatctcgactcactgcaacctctacctcccaggttcaagcgattctcttgcctcagcctgccgagtaactgggattacaggcatgcatccccacgcctggctaatttttgtatttttagtagagacagggtttcaccatgttggccaggctggtctggaactcccggcctcaagtgatccgcccacctcagcctcccaaaatgctaggattacaggtgtgagccactgcacccggcccacttcagccctcttccagaatttcaatgaaaattgtctgaaactctgaaatgccctgatcctctccatcctgactctccagaaacatgtgagcccgagcttttgcccagggccaccctgctggatctgttgcccacctttccaacagaggccccccaaccgtcctgtagctccttccccacaggataggggggaagtcctggcttagttcagaggtctcaaatctcctctccctcgttttttgagaaagggcctcactctgtcaacctggctggaatgtagtggtgcaatcttggctcactgcagcctcgacctcccgggctcaagcctcagcctcagcctcctgccccagcctccccaggagctgggaccacaggcacgcgccaccatatccagctaattttatttttttattttttgtagagatggcgtctcactatattcccaaggttggtctcgaactcctgggctcaagtgatcctcccaccttggcctcccaaagtactgggattccaggagtgagtcaccgcacctggcctgtcccacctcttcatactcatatcccacctgctgttgggacactcaatgccacccctgccttgtctccatccctgaatccagaatcttggtctccctgaccagcccccatctcacaagaccctagcatcatcctcaccctcttcctttcacaccacctctagggtggcagcaaatactatcagctctgccttctaaacatttctaaaattggccactttgctcccatcccctcccctcagctcaatcctggtgggagtcccttcaggctccagctcctgctgtcagccccctcctggacccctggggtagatgcccaacccagggtgacatccctcctctgctcccagcccacagataagtaacaaatcctgaccgtggcctccgaggcctggatggcatggcccccacttgcctggacagcagtccctgcctctcctgcctgctccaggcacctccaggccctcactcagtccccttaagtggggccacccctgtccctgctaaaaactgcccctccccacctccccaacacagcacactgcctcttctctccacacaagttttctcatccacacttattgctgttgatagactgcgtactgcaccgtctgttgcccctgccacacggccagcttcatgagggcacagggctttctctgacccgttactagctgtgtctcagctgtggcatacagtagtcgctcaataaatagacatggaaataatcagctaacttgtgagtgtcatttacaaaaagcaactaaggctggacgaggtggctcatgcctgtaatcccaccactttgggaggctgaggtgggaggactgcttgaggccaggagttcaagaccagcctggccaacatagtgagaccccatctctaccaaaaaacacaaaaaaattcgctgggggtggtggcacacacctgtggtcccagctactcagaaggctgaggtgggatgattgcttgagcccaggaggtccaggctgcagtgagctgtgatcgtgccactgtactccagcctgagcaacagagtaagaccgcgtctggggaaaaaaaaaaaaaaaaaaaagcagctaaaggcaagtccatgcccaaaatgttaagagaggctgggcgtggtggctcatgcctgtaatcctgacactttgggaggctgaggcgggcggatcacctgaggtcaggagtttgagaccagcctggccaacatggtgaaacctcgtctctactaaaaatacaaaaattagccgagggtggtggcgcgtgcctataattccagctacttaggaggctgaggcaggagaatcgcttgaacctgggaggtggagattgcagtgagccgagatcgtgccattgcactccagactgggtgacagagtgagactgtctcaaaaaaaaaaaaaaaagttatgagagttcgatcatgggtcatccgtctagaaggaaaactgagcaacagctaacacctcccctctaggggatcaaggtgtgttacatgggaaaactggccccatgggtggcacatccactgtacactctgggctccgtgccaccaggagccctctaggctgttcccatcacatggcaggaaacagctatcatgtgtgtccctggcccacagccctggtggtcctcgcagggcagagaagccgcagcccccactgccccatcgcagatggggtttcctacatcagcctgcccagtggcgatgccggccctgccctgcattctctgccaggacaggtcacacagagcgcgctgcagtcacctccctgcccagcccacccggagctcaggccacatccactccaatcaattggacacagccacttcttatcatcttcccctccacacccccaacccccaggcagggtctcgctctgttgcccaggctggagtgcagtggcatgacctcagctcactgcaacctccacctaccgggttcaagcaattctcccacctcagcctcccaagtagctggtactacagacgtgccccaccataccaggctaattttttgtagagatggaggtcttaccatgttgccccagctgctcttgaactcctgtgctcaagtaatcctcccacctccgcctcccaaagtgttaggattacaggtgtgagccagtgagccaccacgcccagcccacttctcattctcatctttttttttttttttggaaatgaagtcttgctctgtcacccaggctggagtgcagtggcaccatctcggctcactgcaacctccgcctcccgggttcaagtgattctcctgactcagcctcccaagtagctgagattacaggcacgcgccaccatgcctggctaatttatttttgtatttttagtacagacagggtttcaccatgttggccgtgctagtcttgaactcctgacctcaagtgatccacctgcctcagcctcccaaagtgctgggataacaggcgtgagccatcgcaccaggcttcatcatgtttatctcctcaccaagatggtgcaagccgaggggaccctcccacctccatagggcagccagaggaagcattttgtcatccacaaaacccaatcctctccatgctgtgcttaaaaacatcacattcaggctaggtgcagtggctcacacctgtaatcccagcactttgggaggctgaggcgggcagatcatgagatcaggagattgagaccatcctggctaacacggtgaaaccccgtctctactaaaaatacaaaaaattagccgggcgtggtggcgggcgcctgtggtcccagctactcaggaggctgaggcaggagaatggcgtgaacccaggaggcggagctcacagtgagccgagatcgcgccactgcactctagcctgggcgacagagcgagactccatctcaaaaaaagaaaaacaaccacatccagaacagaactcaagctgctgcctcagctctctgcagccaccctcctcctgtccccatgaaacgtgagtgcctccgggcctttgcacgtgctgttaccgacacctggaatgcctgcctggacccacacaggggtccttccaggatgtcttccctgagctccaacacggccagataccccctttcctgtccccagggatcacctttgtcttggggctggcttaacttctgagacacccataggagctctgattctgataagcatccccttacactgttctttttttcttttcttttttaatacagagtctcgctctgttgcccaggctggagtgcagtggcgcgaactcggctcactgcaacctctgcctcccaggttcaagcgattctcctgcctcagcctcccgagtagctgggattacaggcgcccaccacacccggctaattttttgtatttttagtagagacggggtttcaccatgttagccaggatggtctcgatctcctaacctcgtgatccactcaccttggcctcccaaagtgctgggattacaggcgtgagccactgcgcctggccctctttttcttttttgatacaagacagggtctcactctgtcgtccaggctggagtgcagtggcgtgctcatagctccccttggcctccaactcctgggctccagtgatcctcctgcttctgcctcatgagtagctgggaccacaagcctggcgtctttgtgttttaagcagagccctcccggccatcccctcagggcccctaccgtagaagacagatggtgggtcatggaagaaggggtagtcggtgccaaacagcaggtaggcactgtagctccagctgcccaggtagaagagaaacttccaagcgctctcgggcatcttggcggcatctctgggctggaggcagcaccgcttcgccaggggctatgggggagaagacaggcgggcagccattggtgctgggggccagagactgctcctttggggtggggaaactgaggcccagggactccccaggccgggcagcactgggaaggcctgtcccccatgcccacagccacctggagcataaacagagcccacaggcgcctgccaaggctaaacttagtgcccagctgtccggccgccgcggtgctgggaggggagtgaggggggaggccccgaggggagcaggagggctctgggggccagaagggggacacttgggcttacgatgagggagacggatggatgcgtcagcccaagggagttgggctggtgggggtgacccttgaagggaacatggagggggttatatgggggcatcttgggaaacacagagagccccatgggaccgacacagaggggagaggaagaacttgtgaggaagccgccccctcagtgggagattctggagaggctagagggctgggagagactagggggaaggtgtggcggggacatgggaacctgggggcgatgaaaggggaggaggggctggaggcagaaaaaggggacaggaggcggaaaaggtgtcacaggcgaggtgagaccctgaggggacattgggagtgcagaggaagctgctggctccaaggcaggggttggggagtgcggtgggtgggtgggtggcggggcgcggctccagagctgcccggccaagccccacccctggacaagtcccacccccttcccagaggctgagggggccggagcccagagcacccagcagttgtcatggagacagctggagccggctccggtaacccctggcaaccaggctgctgccaagaagatcagctttggaacacccggcagcccctccacccatttctgaggaagggcgagcctcgaaatggggcgagcaccccacccaaggggctggggagggcccccggggctcggccctggtagtctaccagccgccacatcctcctgtcccgcaggggtgggggacggcttgccctcctgggtctcgggcttcccagctggaaactgggaagaaggcaggggcaacaagcaggataaagaccactgcggacccagggaggggccctggacagccctgtctccccctcccacagtaggggtgtggctggggtctctccctcatgtgggtgatatggggacgggagtggggagagtggcagtcagacaacatcccatcatcgacctcacaagggccagcctcttcccggccagcagagaaaggcccctttgttggcgctgggcacattgtccctgcaccctccagccagacgggcggggtgacaccagctggtccacgggggtgtccaggccaagctaaaggcccaaacaccttccaaccagctcctgccacagcgacccctccccagggaagtgagtggggtcaggcgccaatgtcaccatcatggtcactctctcgcaggggcgatggtctccgcagaaactggggaattctgctgtcgcctcttggaggcagcacagtccaaccctgaagccccgggccatgtcacctccaagggagcgaccactggcgtggccagagcacccaggcccttgccatccctggtcggagggtggcgctgaccccagataggcacaaggcagcgaccgggcagctcctgcctcttcccgattacagcgggcaagccggccccgccgccgcacggacccagcagaaaacgggcagcggacctcgctccgggccggggcgcagcccgcatggcagggaggcgcatggcgcaggccgcggtgcgccgagccctcccgttcccggtcctgggcttctcagtgtctggctcggccctgccggaaagagcgcgcggtggccggagccatccaccgcgcggggccccctggtcccaaactgaccggaaagggccgtgcctcggtcccccacgtctcaaacatcccacctgtctcgggccccccatgtcccagactcaccccagcccggccacacccccgcatctacccggttcccccacgcagcactgtctgaagggggcgcgcggcggcccgagagaccttatcctggggctccaacgtcctgggcctctccagcccgaggcccccacccacgttccggcgaccccttcatccgcagcagccagcgctggaagaaaggaacgcgccggcggccccaggtccccggtcccggcttcccccagtccggggtcccctcgtcccggcccccggccacactgacccgaaagaggcgcgcagtggccgcggagcgcagggcggtccagcccagcgcgccgagcgccagcagcagcagctcgggcggcgccaggtgcgcgtgctcagccaggccgcgacgcgccagcccccagccgcagtccgtgcagccccgcgccgccgccagcgcgctgccccagccgcgctgcactagctgcgcgtagctcggcatgggctcgggccccgtcggccccgccgcgggccccgccgccgccataccgcccgctcgcccgccgtgcccgtcgcctgcgcccgcccgcggtagccgacggagccgcgcgccccgcgtcacgcgccgcagctgggccgggggcgcgcgggcgggagagcggagggcggaggggcgggaccggcgcaagctccgccccgctgggggcgcggctggggggcggccagcggggacgcggggcgccctggaggcgggcccgcgcccctgcccgtttcccagcagagaaacccaggcgcgggggccggagctgggggcccgttggacctggaccccgagagaccccgcgcaccgccgtgtcgcgcccccatgcctgccccgcgcgccccccgctcccccaccccaccgcgccgtgcccgtgacggggggcacgggggacactagcaggcagtcccctcgactggcgacccccgcttctcccggccctccagcacgccacgccgctcccgctccatcgccccggcccgctccgacctcaccgttcttggagccctcgctccttctcaaggacccgaggcctggcacgccttggcacagtcttgggaccatcccgtggccctcccgcattcaggaggcgtaggctcaatgaaacattctcattcttcaaaaggacacggcccacgccagggcgttgggaggcgcacctagtggagacgcagctctctgccctacaccaggagcttggcaatggggttccagcttggacgcgggtaccctgggcacttcccaggcatcttcttctgcaggtctgcacagcgggctactgggacaaaggtgtgatgggggctgctgagattagggggttctctgagggtcacttgctgctgtgaccctggggaacccggggggggggctccccaacatcaggttaatacatgagttgcagagaggctgcaggagtgggtgccaacgtgggagggactcccaatctggatcgactgtgacatcattgggaccaccataagtgactttccaatgcactgttcattgacaaggccctgtgcccaaagccactgaaggccatcgaggaagacactggtcacctctgttaggaccgccatctccccaggcactgctgcaccccccctccatcctagcccgcaggatgtccccacacctggccttcaaggtgcaggatgcagggatgagtcctgcagcagccgcgctggctcccgaacacctgcacctgaacttcaggggcacaggtgaacacaccttccccttgccccacaccgagtcccccacaacacatccaggtggccctgcatctggccacttctctgcatctgcacagccttgccccccgctccccgccaccaccaccactaccaccactaccctcttccgtctggtatcctggcttcctcctcaccccacagaggtgagaaggtggctgcgacgctgttggcctgttcctcgtctgcttgcagccctctatggctcctgttccactcagggaaagcccaagtcctcactggctgccctcacagcgccctgtttccctccgcctgtgggcttttctgctgttcttccaacatgccaagctctgtcctgcctcagggcctttgcactagctgttcccccctcctgaaatgctgttcccctaggtacctgcatggctcttctgccacctgctcaggctgcccccgactctgaagtcacacgcccctcatgtcttcatgtctgcttggcacttgtcaccatctgcccctacatacatacagctcatttttttttttgagttggagtcttgctccgttgcccagactggagtgcagtggcgcaatctcagctgaccgcaacctccgcctcccaggttcaagggattctcctgcctcagtctcccgagtagctgggattacaggcgcctgctatcacacccagctaatctttgtattttctgtagagacagggttttgccatattggccgggctggtctcgaactcctgacctcaagtgatctgcctgtcttggcctcccaaagtgctgggattacaggcatgagccaccgtgcctggccccactctttattcttgaacgtggactccatgtggactaggggcctagtgtaggggtggggcacgaggcttggcctggccaatagttcaggtccagccggaggccagagatgtgactaacgccacaacctgcctggcaggcagagggggacgagggggatatgctctcaaaggtccagccaggcctgtggggcagccgtggacagtcccagccacctccctccaccctctcggccagcactatctggtcaccatggcgcccatcggtcacgggagaggcgccacccacccacccactagccccagctcagcctcgaatttctttttggcgggtccagccaggaggctgccaacgggtgggtgcagggcaggaatggaaggcggctctactggcagctggggaccaggcacccaaggctgggcggaggtcagtcttgaggccagtgtccccccacccaccccaaggtctcctccctccagaaagctcggcctggacccctcctaatgtccctgtccagggagtcctcttttgccacttccctcccctaccaggctgggggtgggggtcgcttgctgtcctgccctggcaaccagagacggggtctggtttcaaatgaataggcctgggtgtggcttggggaaacccagtcttatcttttccctgggagataagcccaggccaggctcagaggtcaaagggcatgcatccccatccagcgccccttgacctcacagccctgtgccaccgagggacctctgcaccggtcatgcccactgccagggtgcctgtccccctagaacctagcctggcagctcctttttgttgttcgggtgggcacagctcaatggtgacatctgggaggctccggccagccctgctgccacccacccacctccctccctaaatggtgcggccgcctctcatcgcggctgggtgcttggccccaggaccctgccacagcaggactctgccttggaggagggtttgcggggcggcaggagcagcacctggggttaacgctgaccctgcagggcccctccggctttgctgagctgaggcctgagtttttcctgccctggcccccacttcctccaggccactaggggttctcattttgaatcttggtgcccctcatgatagcggcatgacttctctgtgcctcagtttcccccgatgccaaccagggctgctcagtggcctctaggggccagggtgaagcatggggacagggctgtgctgcctctggcctgcaggagcaggttgtggctgtgtgaggggcggggtgggggtctgcacacctgctgctcgtcacagaccctggtctccaggaacagccctggatgccagtgccccaggactctccctgagcgtcagctcccacacgcccccagcaaagtgaccagagcacatcatcaggtggaacaccctggagttgagatatttattaacagatgggggtgctgggggtgggctcctgcccccagaggggatgcaggtggatgccgggtggggagggctgcagggctggctcctggcctctgtcctggcttcatggtcctgacagctctgggccagcctcaggcgctgggagcgtactgtagcaccagcctgtcaaagtcgttctcctttagcaagacacatggcaacacagggtgggggcagggtgtggggagacaggtggagggagagagagagggcgcatgtgagcccaggctgagctccaggcgccccctggcctggttctcggggacaggccatccccaccactcaccttggcctggtactccttgatgaagggatgggacctgtgggcatccttcagctgggacaggtatcggtttgtcacctgcaggggaggcagggaggcaggtgagccgaacacggggaccccacggtggctctgacctgctggacaggggtggattggggtgagagccacagtaccccagggggctcctcaccctgccttgggactgggctgatctcggagaaccttcagggtgggggtggagggatgggcctgccccctggagaggcgctggcatggagctggcctccgtacatggtgggggatgtattgtggtgttcaggggagcaggtcgggcagggccccaggtgaggatgggttggggggcacagggtttgtgagggaggtgggctgcggtaggcatactgtatacagagttttcccaggggcctagggattagggcctggaccccaggctggggtcccagggtctggacattagggttggcctggagccctgggggccgcttacctcagggggcttgcccaggtgctgggacaggacgatgaggttgaccagcgtctctgggtagccactatcctggagacacaggcagacacggggaggcagggtcagccactccagcccccatgcctgcccgtcacccccacctcaggcagcaccacacaaggtcacctcctcagaggtggggtgggactgacaccgcccaccgctctgcaaggtggagatctcagatgatacggtgccaaggggccagccgcctcgctgagcctcagtttccccatctgtagtccagcctggggtacgaccccttgtttacagagacttgggaaggttgtatttgtcccacacatctcaaagccatggggcccagacccagatggcctcaactcctgctgtacaacgaaccccgaggccatgggcagacctgccacccctgcaccagctcccaaggagccttgaaggagacctcggcaggggaccttgcctgactcactcactctaggctcccagcacacaggaccctaggaaacatctaggccaggagacccagccagagccctggtgtctgcttggagcacagacacaccaacgaggatgcgcccagagcccgacctgcccacggcggcccatggcagggcacctttttgcagaccggacttttctgagcctcagtctccaccatgaagggggacaccagcttgcgctcacaggagcagccatgaggtggctccaaagggaagtggggggacctgagtgcctcccaaaacccagcaagaatgcagggtgaccacagccacggggaggccaccagggccaaggggcacggccagccagccccaggtggtgtttcaagagacaaggacagaagggagtcatctaactggtgagtcacggaacgtgtcacctgagaggtgtaacaaaagcccccagaggatgcggccatgaacacaacatgcatccaagtgttctcaggtggcagggaggggcagggtggtggaggagggcgccagtcttgcccctggggcagcgagggacacacagcctgtctgagattgcacatcaggctgggagttcctgactagccctgactgctcagagctaaagatggaccctgctcaggaggagcagtacccggcctgtgatggggccagcctgataccccttggccagccccgctctgcaaacaactttctgatgataactcagcccctggaaagtcagacagggaggagggcttcaccagtgtttgtcactagattaaaactgtttctcagctgggcgcactggcgcatgtctatcatcccagcactttagaaggccaaggagggtgagaattgtttgagcccaggagttcaagactaacctggacaacacagtgagaccccatttctaacaaaaaatacaaaaattagccacgcatggtggcataccgtttcaaaaaacaaacaaaaaaccccccaaaattcgtttctccaaaatggaaaaagctttgatgtcctttctgattataaaaataataatccaggctgggcacagtggctcacgcctgtaatccagtactttgggagtccaaggtgggcagcatcatgaggtcaggagattgagaccatcctggctaacacagcaaaaccccatctctactaaaaatacaaaaaattagctgggcatggtggtgggcgcctgtagtcccagctactcgggaggctgaggcaggagaatggcatgaacccaggaggcagagcttgcagtgagccgagatcacaccactgcactccagcctgggcgacagagcaagactccatctcaaaaaaaaaaaaaaaaaaaatccaccaagcatggtggctcacacctataatcctaatgctttgggaggctgaggtgggacgatcacttgaggccaggagttcgagaccaacctgggcaacacagcaagaacaaccccgtctttacaaaatatatatatatttttaatttaacataacataaactcttcataaagactgcagatggccaggcgtggtggctcacgcctataatcccagcactttgggaggctgaggcgggtggatcacctgaggtcaggagtttgagaccagcctgaccaacatggcaaaaccccgtctctactaaaaatacaaaaattagccaggcgtggtggcagccgcctgtaatcccagctacttgggaggctgaggcaaaagaatcacttgaacccaggaggcggaggttgcattgagctgagatcacaccactgcactgcagcctgggtgacagagtgagactccatctcaaaaaaaaaaaaaaagaagaaaggaaaggaaggaaaggaaggaaaggaaggaaaggaaaggaaggaaaggaaggaaaggaaggaaaggaaggaaggaaggaagggaaagaaggaaggaaggaaggaaggaaggaaggaaggaaggaaggaaggaaggaaggaagaaaagactgcagacatcaggcaggagatgactgcagccaccctgggcaggcagcgctctctcaacgaagagctcctgtccacagcacactctcccctacataagtacggggagtgtctctccaatactgagtatgtactcaggtgaggggtcccacttgcaggtcccgggccaggcagctgaggtgacaacaaggacggctcagaccactgaggcccaggctgcccagatgccccatttctgtgaggccggaatctggatttctttgcaggtgagatccctgctttgtggatctcgctgctgactgggccttagaagccctgtggggccacacgcacacccagggggtctctgctacacttgtttctgtccgccctgaccccaccctctggccgcctggccttccctccgtccccactctgggacaggcttgtgcctaccttgtctagcgcctcctgcagcaggccctcagcggcctcccagcggccctgggccatgtggcaggccgcctgcccattgagcagcagcagggtgggcgagcacttgtcagccatctcctggaagatgtagtaggcatcctgcagcttctcaccaccctgcagggagggtcccgcatcattgcctgtgcccctgctgcccggcccttcccccgccagccccctcccctagcgggggggactccagcactgcacagagacgaatctggtgtgcccggttcaaggcacagccactccgccatggggactacccgtaacttgtactctgctgatggggcctaaagactcgtggccgcctcctgccccacctcccacccagctcccggagtgctgagtacacagaggtggaatctggggcttccaaggcctcagtgcacaggtggctggctcagggtctgagtggggaccactgggtcactgagcacgtcagaggaggaggagtcagctctgtgaccagcagccctgacctgtccacttgctcagaacagcagaacacttgcagggggagcctgaggccaaggcaggcagtgaaaacagcccaaactacccgataggtctgccggggcctgtcctaccatactagacggtcactggaagtctgtctgggtgaggcttcagccccgtggcgggcagggacggggagcacatttttttttctttctcagagtttcactcttgttgctcaggcaggagtgcactggcgcgatcttggctcaccgcaacctccacctcccgggttcaagcgattctcctgcctcagcctcctgagtagctgggtttacaggtgcatggcaccaagcccagctaattttgtatttttggtaaagatggggtttctccatgttggtcaggctggtctagaactcccaacctcacatgatccacccgcctcggcctcccgaagtgctgggattacaggcgtgagccactgcgaccagccaggaagcacattttaataggcccacacaaaagagtggctcagaagggggccaagtcccagaaaccaggagaggggctgttgccgggcggaggtgcccaggcctgggagctgaggacatctccaccgctgctatgggaacactgaactccgtccctggctggcgaccaggaccctggagagcaaagctgagtcgcagaaaaccccaggaagccctgaggggaggagggcctgccaggccaacccagaccctcgagtacccctgtgcctcaggctcaggaacccgtccccgcccccaccatctcttcgctctggctctggccaagtcgcttggctgtgagaagcccggaatggagtcaaggctgagttatgccaggctggcaggggccacggcctgatcctggagccccactggagtggccagcagcctacgcacaggtgggggtgcccacagaccctgctcagccaggtgcccgcaatgcccacccacctcatggcctagggctcaccgtggccaggctgacccaggcagtggcgagctgggtgagggtggcatcctcgtccaggtcctgcattctcttcagctccttcctggggcggggacagatgacagaggggctgagtggccgagggccctggcctggccatccctgccttgtccccacttggggcccaccggagcctggggatggcccctgctttgtgctccactgcatgctcataccccacgactaagtgcccgagccaccctgcccgtctgaccacgtgcaggccctgggaaggtgggactggggccagctatggccccccagggtggccaccacaaggtagagctcaggagagactcactccatggaggatggaacgcagggaagggcaacggaactacagtgtgaacaactctgaggcaagggctttggaaacggcagcaggggagtcctggacccccagccatggcctccgacctggtgatgccacgtgcaggccccgccagccccacggcacagttacaagctggtcaagtaacatgttgctccaggcacaacctccactctccctccatgaagcccaccctcaccctgtgggagaggcctgccacccactgcatagagagaaactgaggcacagagagccatggccctcctccctggcaacatactgcagggaagggctgaacgacagcaagccacccccatggaaaggaaagacaacaagagtaatgacagcaccacagacgctctgggctgtgacgctctgggctgtgacgctctgggctgtggctcagtgcgggtggagaggggcaggagggctcaccgggcgaggtccaggcggtccagcttcagcaggatctgcactgtcatggctgtgctgcaggacagggcgagggggcggtcagcgggtcgccacagacacattgcatggccgctccacacccagggctcactgtgtgtgtctgggatgttcctaagtcctgtgcttaggaccaccagccccgcccagcagaggaggacaccctcactcccacatttcaccgctcagcttcctcaggcccaggagctctgggggaggtacccaggatggggtttcaggccccggcccactcaccgcccatctggagaagcagcctccatgggctgtgcttccagatggagggccctgcccggactcgacaccctggaggcatcaacactcaggaacaaggccctagaggagggccacgcacccgcccctgcacctgcacctgcagcagagccctggggccacccactctctgcaggccccctcgtcccctcatccctctcagccccaggtggctgtgaccacgaattactcgtgaggcctcttgttcttgttttcctgccaacaggagccagcacctggaccagcaccgagtcggccggctcgccgacagtgtgacatccctatttattttcttttttgtgtgtgagtcagggtctggctctgccacccaggctggagtgcagtggcaccatcacggctcactgcagcctccacctcccagactcaagggatactcctgcttccgcctcccaagtagctggaaacataggtgcatgtcaccatgcctggctcgccctgcaattctaagccctctgtggatggaggtgggatgggagcagatccacagcgaccatgaaatgcccagcttgcaactcacagtggaaggcaggcactgcagggacagctcacggggaagaactgacacactttctgtgaccagtgccctggacatggcccggagtcacatcctagggtggaggggggcaccaaccttgcagggcttcagcaccccaaccccagagggccctggaggagggccggtatggggggcccggggaggcctgagagactgggcccagggccgagacacagaaggcttcgtggggggtggggacacagaaaccgagcagagacaaagccgctttctgctctgcccttgggaacagagggttgcagcctgggcaccgtgtccttggatctgcagcctggtgcgcagatgggagtgcctcccacactgggcaggggagctggagcctggacagcaggccagggcctcatttcagcaccacctttctctgctcccatgacgacagccagcgaggccgtgcgcagcctggagatgtggcagggggcacttgcctccctgggctggccccagagcagggaggccactcaccactccaggctgtccccctggtgcagcgcacgcagggcggcatccgggttctggtcgtggagatagatggaggcggccatgagcaggaaggtggtgttggtcacgtccacgctcctgctcatctctcggtccagctcggccacgatgctgtccctgcaagacagagatgctcacgacccacagctggggtggcctctgtgggacctcagagggtccccttccttggaagcagacaggtccagagagggtgagccaggccctgggggtgcagagcagcagcaggccgagcatcgagctgtcccgacatgtcctccctccgttcctatgaagcacctctcatgctgggccaggcaaggacccgaggccgggagatgtggggtggggcgctccaaggggacatgaggaggcaccgtcagtctcacaccaacctcacccgccttcctgaggaggctggtgggcccagctgggactcctgaccataacccatcaaccctgtgggcttcaaggccacgtcttctagcaggaggtcggcctgggtgccgaggggccgtgcagaaggatgggagccctggggcacccccactgccagggcagctgccctcagtccctgagagcccagggtgctggctgcaccctgaagatggccagtgtgctgcgggccagggccaggcttgagcccaggcaaggctgaggaccggctcagctccgagggcacaggtcacccatgcctccatgtccctaactggacccagaccctccattccccatggctattgagcagctaaaaagagaaggcaggtgagggggccaccctagaccaaagctggtgttcttctgggttcaaacgtggctctgtgaccccgtaagcatccacgcgcatctgggggctgtctgcccagggcccgtgtctgaggtgtcactgagggcatggcatgtctgataccaaccaggctccactgagggctcgccacagtgccaggtccaacagacaagtgacttcaggtctgagtctgtttccccgtgctgagggaccatgttacagggatcatgcaggggaggagcaaggagctcccaagaccatcttacaaagcttcctgaggctccagcacacaagggtgtataaacactgccagttgtcgtagcgttggtactgtaatgttgtcatcctaaggtgttacaattaccaatggggccgggtactgtggctcacacctgtaaccccagcgctttgggaggccaaggcaggatcgcttaagcccaggagttcaagaccaccctgggcaacatagtaggacccctttttctacaaaaaagtaagaaagtcagctgggcctggtggcgcctgtagtcccaactacttgggaggctgaggcaggaggatggcttcagcccgggaggttgaagctgcggtgagctgtggtcacacctctgcactccagcctgggtgacagagggagaccatctcaaaaacaagcaacagcaacaaaatcaattactgggcggatcgcttgagcccaggagtttgagaccagcctgggcaacatggcaaaaccccatctctctttttttttttttgagacggagtctcgcactttcgcccaggctggagtgcagtggtgcgatcttggctcactgcaagctccgcctcccgggttcatgccattctcccgcctcagcctcccgagtagctgggactacaggcacccgccaccatgcccggctaattttttttgtatttttagtagagatggggtttcacgtgttagccaggatggtctccatctcctgacctcgtgatccgcccgcctcggcctcccaaagtgctgggattacaggtgtgagccactgcgcccggccaggcaaaaccccatctctaaaaaatatacaaattagccaggcatggtgatgcgtgcctgtagtcccagctattcgggaggctgaggtgggatgatcacttgagcctgggagatcaaggctgcagtaagccaagattgtgccactgtatgccaggctgaacgacagagcaagaccgtatctcaagaaaacaaaatcaaaaccaaaaccaattactaatggatgctccttgtccccggggcgtcctgccaatgaggtcgcggctgtgcagccagatgaacggaccacaagcccctgcctggaccgcctgctctccggggctgcttttctgtgatgctcacagcagctgctgctcctgggggacccagggttccctgccttcactccagctggtgaagtaagtgcagggtgggagaaacagtggccctgggaggtcacctgtctcaatgtcctggagctgctgtggcaaagcaccacagcccgggcagttaaggacaacagggattcgttcctcacagctctggaggccgtaagtctgaagtcaaggtggcggcagggctggctccagctggaggctggagggcaaggccgtcccaggcctctctcccagctctggtggctgctggccactcgtggtgctccttggctagcagacatgtcactccagtctgttgtcacatgggcttaactctgtgggcctctttcctttttttttttttttttttaagacagtctcccgctgtcacccaggctggagtgcactagtgcgatcttggctcactgcaacctctgcctgccaggttcaagcgattctcctgcctcagcctcccaagtagctggaatcacagacatcacatcctgttaattctgtatttttaatagaaatggggtttcaccacgttggccaggctggtcttgaaaactcctgacctcaggtgatctgcccacctcgtcctcccaaagtgctgggattacaagtatgagccactgcacccagccctccttttatctcttaaaaggacacaagtccttggctttggggcccaccctaaatccagcatgtcttcatctccttatctcttaatctgatcggcaaagaccctttttccaaatgatatcatattcacaagcatgtgggataggatatggacgtaccttttgggggacaccattcaccccaccatgctgcctctgcacaggagtcagctcccaggaaccccaggtttctttgagtgaagggaggcggtagttgggacactgcctccgtgggccaaggaagagcaggatcacagcagtctccccatgccagaccctcactccgaccccacagcaggagggggcaaggttcctgggtccccacagcccagccccctctccccttggctgccgcccatgggcgtttgaccaacgctggcctgtggctcaggggcaggacaggcgtggcctcacccaccctcccactgggctccaggggagatactggcaggttgcagtccccaactagctgggactagaaaactgataggatttgggaggctgaggtgggcagaccgcctgagctcaggagttcgagaccaccctgggcaacacggtgaaacccagtctctgctaaaatacaaaaattagctggacgtggtggcacgcagctatagtcgtagctactcaggaggctgaggcacaagaatcacttgaacccaggaggcagaggttgcagtgagccgagatctcaccactgcaactccagcctggtgacagagtgagactccatctctaaataaataaataagaaaactgatgggagggccctgcccccgctgcgccctgggctgtcttggggctctgggtgttgcagagggctgctcggtaattgatattttcagttctaggttcagagagtgccttgtggtccatgagggcgtgtgcacacacagcactgtctctgaccctcccctttgaagcaggatccatcaccagccccccactgctgtgcaggtgagggaaactgaggcacaaagcagcaggggagcagaggggagaggcgcctaatctgagggatgctgtgcgctgcacgccatgcccccacccacccaggttcataaccaacaggccttgaagatggccccgcgcctcaggccaacccattctctggggcctcacctccgactctcgtgggcgaggtagtcagcaaacatgcgcacggcctggagctcaggggccgaggagggcttgatctcatccaggaccacaccgaacttcctctgcagtagggacgaggcgtcagctgcacccgtccaccccagaggatttccatgtcttcagcttggcagggagagccccagacaggaagtccctgccccaccagggacccctcagcccagcatgggccacctccactgcagtacactgtggagggtggcatggcgtcacctgtcgtgagcagccaggtgtgccctcatctgcagggccacactgcccatgccttgagctagggaccctggtaggttactgtctatcccctggcagctgtccacctctggtggtgaggtgaagggcgtgtcacctgggggcagggcagcagcagttatgggggttgtgacatgcgcttctataaagcaggacatgcccccagccagccctgcccacctactggccctctgaggatgcccagactgataccactgtcacatctgcagctgggggcccgtccctcattgtgttccctcctagatggttccttccccatttttttttttttcgagacggagtctcgctctgtcgcccaggctggagtgcagtggcgtgatctcggctcactgcaagctccacctcccaggttcacaccattctcctgcctcagcctcccgagtagctgagactacaggcgcccgccaccacgcccggctaatttttttgtatttttagtagagacggggtttcactgtgttagccaggatggtctcaatctcctgaccttgtgatccacccaccttggcctcccaaaatgctgggattacaggtgtgagccaccacgcccggccttttttttttttttttgagatggagtttcgctcttggtgcccaggctggagtgtaatgctgtgacctcagctcaccgaaacctctgcctcccaggttcaagtaattctcctgcctcagcctcccaagtagctgggattacaggcatgcaccaccacacctggctaattctgtatttttagtagagacagggtttctccatgttgaggctggtctcgaactcctgacctcaggtgatctgcccgccttggcctcccaaagtgctgggattacaggcgtgaaccaccgggcccagcccccattcttatttttttagagacaaggtcttgctatgttgtccaggctggagtgcaatggcgtgatcacggctcactgtaatcttgacctcctgggctcaactgatcctcctgccacagcctcccaattagctgggactccaggcacatgccaccatgactgtcttattttttaatttttttttgtagagacgggggtctcactatgttgcccaggctggtcttgaactcctggcttcaagtgatcctcccacctcagcctcccaaagattacaggtgtgagccactgtgcctggctcctaccaattattttaggaaaaaaaaaaaaatcggctgggcgcgttggctcacgcctgtaatctcagcactttgggaggctgaggcaggtggatcatgaagtcaggagttcaagaccaccctggctaatgtggtgaaaccacgtgtttattaaaaatataaaaattagccaggcgtggtggcgcacgcctgtagtcccagctacttgggaggctgagacaggagaatcacttgaacccaggagacggaggttgcagtgagctgagatcgagtacgacagagtgagactccgtctcaaaaaaaaaaaaaaaaaaatcaagaagctgtgacccaggccccctggcctggcagtctcaggcctccgtgacacagccaccttcacatgctggctgcgctggctgttcacagtcactgaacactgcaggcctgggtccctgctttgtttactgtccccgccacccactctgtggtgccttcctgtccccagccccaccctctactctgttcatcactcttgcccccggccaaggcccgcactcacctgcgccaggtacgctctatacaggaagacgtccctctccacgtctctctctgggcttgatagctgtgggaaccaatgtgagtcaggacgcacagtgggaggcccagcgcagcccacacagggtgagcatgacagacaggcccctgtacactggggacaggtggcttctccggcagggttggaggtctgagtcccagccctgatcctccgtagcccgagtggcctctgctgggggtaccctacacggggggtgcctgatctcatcccgcgctgacaccaccccaggaaggaggcttgctcccaagttcagtgtctgccccagtcacacttaagaagccagggtggcacccgcacctctaacctctggacatggggccactgtggcttgattctgttctgcttttgtctcaagacattttgagctcagtttggctgccccagtgtggtgacatctgtgcccagccctggccaggggagaccctgggaatggctctgtacttgggccacacccccacagcccagccattgcacagaactgaggagcaagagggaggtaacctgtggcaacatccattttgggatgataatgaagctgcccctgagcccaggccagggagggaggctgggaccgctctccagaacacagctttgcatgctgcccccggaggctggctgacttcccagggtgcccatggcaggtgggcacagtgcagctcagcccatggcctgagggtgctcgcccaggcccctgggggcttcgagaggaaagtacagttgggaaggggcccagccaccttggcatcgccactccaacaacctctaaacagaggggactgagaaggctgtcagcaagagggcctgccagctgtcaaggcacagggtcaaaggacccagtgcccaaaccagggggagtcactctgccctgtcctctgaagccgagaaccacagattccaagccacatctcttccttctccccagcctgagggaggagcgtggatgtcaaacgtgtcctcatcccaggccgccgcagacctggccccagcctgactcaggctgccattgccaagaggacccagcagcttctgctcaggccctggtagccagagtgggtatctggctatgatttggaacaagatgccatctaaataaataactcctagaagaatgtcaaaggcatgcggagggtggtggctgcagaaatcgagccccacctgcaaatgggatggacaggtgaaatatgtaccttttcaagtatgcaaagaaacatattataggccgggcatggtagctcatgcctgtaatcccagcactttgggaggccgaagtgggtggatcattagaggtcaggagttccagaccagcctggccaacatggtgaaaccccgcctctacttaaaaatacaaaaattagccaggtgtggtggcgggcgcctataatcccagctactcaggaggctgaggcaagagaatcacttgaacccgggagatagaggctgtagtaagccgagatcacgccattgcactccagcctaggtgacagagcaagactccatctcaataaaaaataaataagtaactctcaatcaaccttctgaggtggacttcagttaggtgactagcccagggccacatgccaccctcagttaaaaaagacaggccaggtgtggtggctcacacctgtaaacccagtgctttgggaggccaaagcaggagcactgcttgagcccaggagtttgagaccagcataggcaacatagcaaaaagcatagtcttttttttttttttttttttgatggagtcttgctctgtcacccaggttggagtgcagtggcgtgtatctcggctcactacaacctctgccgcctgggttcaagagatttttctgcctcagtctcccgagtagccgcgactatatgtatttttagtagagatggggtttcaccatattggccaggctggtcttgaactcctgaccttgtgaaccagccgcctcggcctcccaaagtgctgggattacaggcatgagccaccgtgcccggtctgagaccctgtgtccataaaaaaattataaatattagccaggtgtggtagcatgcacctgtagtcccagcgactcaggaggttcatgaaggaggatcgcttgagcctgggaggtcgaggctacagtggactatgatcatgccactgcactgcactctggcctgggtgacagagtgagaccctgtctatctttagggaaaaaaaagagacaaaagctggctgttgggctttcaaagtgaggacacagtggggcgccatcgggggcaccagggtggcctcagccgcccctgtgtgaaatgcaggtgcccaggagactgtgcgtgcggaagtgctcagaggctgcagagtgcactggagagacaagagtgccgggaagcataacaacaacaaatgtgcagaccgtgaccctgacgtgaggctctggaaccgttgtggttttcctcgacttccagggacgatcctaccatcaggacgcatgtgtgtccccggggtgggagagcattgctcttcaaccccaagggctcactacgatcacctgggagcccaggaaccaccaaagccaggaggccacatccaccaaggtcacctggccctaggatggccccagcactggccccaggtggcttaagatgtggccatggttgaggaatcagggtactgtttgggaaggcgggtgacaggatgggggccctgtagccagaaaccttgggggtagtaactcctcccttctgtccctgtagccagtgatctgaccgcactgggccgtcagcaactcaaggcctatgagctgcttcaaccccaacagctgggcggtgcctgccatcttgtgggcaaactggcaaatgtcagaaacccagaaacgtcatgatggtagcctagtgctgggggcagcaaagggcaaagactgccaggtgctctccctggggccacctcaggtggggctgaggttgctcaggccactgtcatgaactaccacagaccagatggcttaaaaaatgtattcctcaaaaattagccaggtgtggtggcgcacgcctgtaatcccacctactcgggaggctgaggcaggagaatcgcttgaacccaggaggcagaggttgtggtgagctgagatcatgccactacactccagcctgggcaacagagcaagactccatctcaaaaacaaaaaaacaaaaattagctgggcgtggtggcaggcacctgtaatcccagctactctgaaggctgaggcaggagaatggtgtgaacccaggaggcggaggatgcagtgagctgagattgtgccactgcactccagcctgggtgacagagttagactctgtctcaaaaaaaaaaagtattcctggccaggcgtggtggctcacacctgtaatcccagcactgtgggaggctgaggcgggcagatcacttgaggtcaagagttcgagatcagcctgaccaacatgataaaaccctgtctctactaaaaatacaaaaattaggccaggaacggtaactcatgcctataatcccagcactttgggaggctgaggcaggcggatcatgaggtcaggagttacagacgagcctggccaacacagtgaaaccccatcactaggaaaaatacaaaaattagctgggtgtggtggcacacgcctgtagtcccagctactagggaggctgaggcaggagaactgcttgaacccgggaggcagaggttgtggtgagctgagatcgtgccactgcactccagcctgggcaacagggcaagactccatctcaaaaacaaaaaaacaaaaaaaaaattagctgggtgtggtggtgggcacctgtaatcctagccacttgggaggctgaggcaggacaatcgcttgaacccaggaggaggaggatgccactgcactccagcctgggtgacacagagtgagatcctgtctcaaaaaaaaaaaaaaaaaaaaaaaaagtattccttcacagtcacagtcctggaggccagaagtcccaaatcaaggtgtcagcagggccacactccttccaaaggctctaggggaggatacttccctgcctctcccagcttttggtgactgttacattcctcagtttgtagccacattactcccatctctgcttccatcatctctgtgtctcaaatctccctctgcctttttttttttctttttccagtggcgggttctggtgaagacaagaaagcctactagaaacattctttttttctttttttttttttttttttgagatagggtctcacttttgacatagtaagagcaccaacatctcagacaaacactgccactttaagttccagccccctttctagcctcatgaattttaaggaaatttcttttttctttttttttaatagagaagtctcgctcttgttccccaggcttgaatgcaatggctggatcttggctcactgcaacctccacctcctgggttcaaacgattctcctgcctctgcctcccaagtagctgggattaaggtgcctgccaccatgcccggctaatttttgtattttttagtagagacggggtttcaccaagttggtcaggctggtctcgaactcctgacctcaggtgatccgcccgcctcccaaagtgctggaattacaggtgtgaaccaccgcgcccggccaggaaatcacttctaactacaagcagccagaaagaggagacagtaaaacacagaaagacagctcggacagagagagagtgggaagaaaatttcttgggtaactgccaaacttcaccttcatacaacgggccccagtaaaacagtgggccttaataagcacattcctttcccttcaggtgcactaaaataggcaagctaaaagcagagtaggggggtatgcctgcagctgcagaaagatgtatgggaggctgggcacggtggctcacacctgtaatcccaacactttggtaggccaaggcgggcagatcacaaggtcaagagatggagaccatcctggccaacatggtgaaaccccgtctctactaaaaatacaaaaattagccgggccatggtggcgcgcgcctgtaatcccagctactcgagaggctgagaaaggagaattgcttgaacctgggggcggaggttgcagtgagccgagatcacgccactgcactccagcctggcaacagcgcgagtctccatctcaaaaaaaaaaaaaaaagaaaagaaaagaaaagaaaaaagaaagatgtatgggaacagacacacaactctccctcccagataagcacaacgaagagacacagaagcagttcaagcctctgataaactctccgaccctgaatccttaaaaactcttagtctgtaaaagagtgttactctgacccaactccgccagaaggcgcctctcaggtttgttttctctaaaataaacctgtcttgactggcaagccacctttcgtgtttctttcctctttaattcttacaactttgtcacccaggctggagtgcagtggcgcgatctcggttcactgcaacctcggcctccgggttgaagcgattctcctgtctcagcctcccggtagctgagattacaagtgcccgccaccacgcccggctaatttttggtagactcatggtttctccacgttgcccaagctggtctcgaactcctgggcgcatgcgatctgcccgcctcggcctcccaaagcgccagaattacaggcgtttgagccactgcgctgggaaactgtgtttatcattctgagtccagcggaatacagtgcccgtccaaaaaagtgctcaatgaagaatgaatgaatgaatgggtaagctctgggagaaataaccaggctggttgggcagggaaacgtccttctctgaactttagggttctcatccgtaaaatgaggataagcaacagtctccatctcacgggaactgaaggtatggctgaacaaaataggcttattgtcactacagtggcataaacacctcccttactcaaaacactttcaagggcgcagagagaacgctgtacgagtgagcagtaccgtaaactgttactgctctgggttctgtcacgggacagtgactactcctcactgaactgtggaagaggtggcccaaaaaacgcgagaagaaaagagaaagtttttagacgcagaacgcggctcgcggccaccagaaagcgtcctccgcctccgcccccagcgtccccgcgcccctgcgcggccgcaccttcacccgctgcgcctcgtttatgcactgctggtagctgccgatgtagaaggcgttctttacgtcgaacagctcgtctacctccccggagccgccggaggccgggccgggggccggaggcgccatttcgctgtcttctcaccagctcctcttcctgaaagacacgtcagccggaagcaagacacgggcacgctaggaaatgtagtttactttttccgagcggcggcgaagtaagccaatgggaagctccacaataatatgcaagggggcggaaggcgtaagtgcgtcacggagagcatctcgggaattgtagtgtgtttctgcaagccaatgggatccggggaaacatgataaggatgcggtcgaggctgggaataggctgagggagctggagagggtgggaccacgcaggaggcagatccaataaacaggaagatttttctcgtgacgtcgtcggcgcgcgccggaagcgcggatcacacgggcccctacaaggggcccctacaagcggccacaaggatggcaggcttcgcggagctcgggctgtcatcgtggctcgtggaacaatgtcggcagctgggtttgaagcagcccacgcccgtgcagctcggctgcatccccgccatcctggagggtgagtatggcccagggccttccccaagaggcctctccgctcctctcgactcctttcccttctcgcaacctttgcttattccggtcccacgaggcgaggggcaacctcgggcgttacaggagatccggggttccggaggacgactggacagtgttggcatttaggttgcatgactgactcgctttgtgttcgtacgcaagtgatgtaatctctgaaattttcatagtctcagcacagggagggtttgatggatgactagtccgatagtatcgcaaaatcctgcagacctggtactgctatctttattttacaaatagaagttgaggctgtcaaaattgctggtagatccaggactccttggtcctgtgattgctcctctaggagaaggtcttctctctgctcctctagcccaacccagtttcgccattaaagagaggcccacaggaagcctaagatgtgataagtcagggattaaataaacaaatgaaggggtcaacagggagcacaagatgcatatgagggaagggaattctggattccccaaattcacgtgctcctggacggagttagaacgaggtggtaggaagctgtgggcatctcgggtcaaatggatatgggttccagtccagcctgccactcactggcagtgtgtcctgggcaaggtctctgaaacccagctgtccacacatggagggtgttgatgctgctttgtccccaacccaggtcgagactgcttgggctgtgctaagacaggcagtgggaagacagcagcgtttgtccttcccatcttgcagaagctgtctgaggatccctatggcatcttctgcctcgtcctgacacccaccaggtaagcccccagcaggcctcctgggtatgggttaaccagctgtgctctcttgggcaagcacctttccctctctgagcgcccttttcccacgtgtgagatgagcatgaaaatcttgctacccgcttcttaggggtcctgcagaattaaacaagatggccccggtgcagtggctcacacctgtaatcccagcactttgggagctccaggtgagcggatcacttgaggccaggagtttgagaccagcctgaccaacatggagaaaccccgtctctactaaaaatacaaaaaattagctgggcatggtagcgcatgccgtaatcccagctactcgggaggccgaggcaggagaatcgcttgaacccaggaggcggaggttgcggtgagccaagatcgtgccattgcactccagcctgggcaacaagagcaaaactctgtctcaaaaaaaaaaaaaagaaagaaagaaagaggcaggcagcagaaagggtactgggacctgggcatattggagccagtttgagaaaggccttgaatgccaggcggagggttagaattgattctgggggtgtgtgagcaggaaaggtcatgagccagggagaggccaggacagagttggttgggggcagaaaggaggctgatgcttgagaccctctggctggggcaactggctggtggtgaggccattgctgaaaggcgaactgggggaaggcacaggtttgggataggaagagatgctgaggtcagcttgggtcgggctggtgaaggagggatgttccaggctgagcctggcgagggggcaggggccacaatggcctccaaggctcagcatcagagcctttgtgaacaggactgggcaagtcaggagcctgggggctcagggaggaaccctggggatggagaggggaatggggggcaggtccagaaccactacctgacccagcctggccccttcacacccacagggagctggcctaccagatcgcagagcagttccgggtcctggggaagcctctagggctgaaagactgcatcatcgtcggtggcatgggtacgggagctgggaggcgggggaagccccagcatgggaccctagcagctttggaccacctgcccagccctgcctctcatgctctgtcccccagacatggtggcccaggcgctggagctctctcggaaaccacacgtggtcatcgccacgccggggcgcctggcagatcacctgcgcagctccaacacttttagtataaagaagatccgcttcctggtgagttcgccccgcccctgcagacctcaggagctgggctcggagcctccaggcccaatgtcagagcctggggcaccatctcatccatttaggaaacgtatgtccgttagactgtccagtaaaacgctaggaacagtgacaaggaccgttcaaggaccaacaagagggggcccagtcctagcaatgttattcgggggtagggccttgctgagacttgggtgaggggcaggcctcccttggaaggagggtactccagggcctagggtccatgtccatgcctctcaaagaggcctgcttcaggggtggccaagacccggggccatggacggcaccctcacccctgcccccattggcacggcaggtgatggatgaggcagaccggctgctggaacagggctgcactgacttcaccgtggacctggaggccatcctggcggctgtgccggcccgcaggcagacactgctgttcagcgccacgctgaccgacacactccgggagctgcagggtctggccaccaaccagcccttcttctgggaagcacaggccccgtgagtccacagcccagacagcgtggggagggcagccccatcctacagacagggacactgaggcgtggcggtctatctgtccatccccagggtgagcaccgtggagcagctggaccagcgctacctgctggtgcctgagaaggtcaaggacgcctacctggtccacctgatccagcgcttccaggatgagcacgaggactggtccattatcatcttcaccaacacgtgcaagtgagcggggcccgcctctcccctcccaccgcccttcaaaggaggaggtggcccgacgtctttggtctgggacacacagccagtctcagcactccccagcctctgctcagcctggaggtcatgggggcttccctcaaggagccaaggtccctcaatctgaaggtgcagccggcctttggggttcctcagcccagccgttgatggaagggccaggaaacccctgcaagcagctgtttgagcagcccatttgctgtgttctgggggtgtcactgagctttcctgggcctttagtcccatctcagaggaagttgtgacaactaacaggcctggtgtgcgtctgcacagacagagacccctggggagggcagttcatatcttcattgaattgtttgggaaggtcattgagaagctggaggctcttccagcatgagccaggatagaagggcagaaatcaaggcgctttaaatgcgttacctcccagaagagaaaagttgggactgggtgcagtgactcacacctgtaatcccagcactttgggaggccgaggtaggcggatcacctgaggtcaggagttcgagaccagcctgcccaacgtggtgaaacttcatctcgactaaaaatacaaaaattagccaggcatggtggcgagcacctgtagtcccagctactggggaaggtgaggcgggagaatcacttgaacccggtaggtggaggttacagtgagccgagatcacgccactgcactccatcctgggggacaaagtgagactgtctcagggaaaaagagagaaaagtttggctgcagggtggctgtcaggcgtggcaggatccagcagcttatgtgatggtccccatcctttctccctgtgcccctctttctcctctgttttcctctgctggctccttcttggccttcttggtaacagtgaccacccctagcaagtcagtttccagccttccagccctgcagtcccagggccaactcttgtcagttccagctccagggagggatcagcagagaggacatcaggcaggcaagccgtctgtcaaccctcatcctgcctcttttttttttttttttttttgagagtctcacgctgtcccccaggctggagtgcaatggcgcaatctcggctcactgcaacctctgtctcctgggttcaaacaattctcctgcctcagcctcctgagtagctgaggctacagtcatacaccatcatgcccggctaatttttgtgtttttagtacagatggggttttgccatgttgggcaggctggtcttgaactcctggcctcaagtgatccacccgcctcagtctcccaaagtgctgggattacaggcatgagccaccgtgcctggcctgctgcctctcctttctaagctgcatgaggccactgtgctaggtgtctcaggggcgggtgggggcaggaacaccttcccagaacctgagagctggaggggttgacaggcacatccttcccgccaggacctgccagattctgtgcatgatgctgcgcaaattcagcttccccaccgtggctctgcactccatgatgaagcaggtgaggccaccctggggcccgccagcctcaccctgggataccttccccgcctcagacattggccccgatccttccttctgccgggcgccttcttcctgccacctggtctcttctggtcccagaatatcgcagctcaagaggccctccctgaccgcatctcttttagccgtcattcatttgtcccggtctgacttctcatggccaccttcctcaatggacggctggggactgtcccggcctccaccctgtcccgaggcctcacacagaaaaccctgccttcatgcattcccaattttcttcccaaccctgtgcagaaagaacgctttgccgccctagccaagttcaagtccagcatctaccggatcctgatcgcaacagacgtggcctcccggtgagcagcccccagtctcctgccaagggcactccctcttttactacaaggccccacagatgagaaggctggcctcaggcatgtcaggcagccctagcatccctgctgagtgaccctgggtgagtccttgcctcggtttccccacatggacagtggagctgaccagccacctctgcctccaggggcctggacatccctacggtacaggtggtcatcaaccacaacacccccgggctccccaagatctacatccaccgagtcggccggacggcccgtgcaggtgagcagtggagggggaggccgagccttgggcctctgtccctccagcctgcccagcaaattcaggtggtaggacgtgggtagggtgcagcccacagatgagagctactcagggccatgtttgcaagttggggagttgtcctttctaaagcaaaggtgaatcccagctactcgggaggctgaggcaagaagatcacttgaacccgggaggttgcggcaagctgagaatgcactattgcaccccagcctgggcaaaaagagcaaaactctgtctccaaaaaaataaaataaaataggccaggtgcggtggctcacgcctgtaatcttagcactttgggaggccgaggtgggtggatcacgaggtcaggagttcgagaccagcctggccaacatagtgaaacactgtcttactaaaaatacaaaaaaattagccaggcgtggtggagggtgcctgtaatcccagctactcgggaggctgaggcaggagaattgcttgaacccgggaagcggaggttgcaatgagtggagatcgcacaattgcactccagcctgagcaacagtgtaagactctgtctcaaaaaataataataaactaaaataagtaaataaaataaaattgtaaaataaagcaaatgcaagtcaggtgctgccttcacccaagccaggtgatgaactgagcagtgtggggctgccccctgggagggtgcacacacagctccggcccccactacttgctgctgcctcgtcagggaggggcatggtgtccatgagatgctgtcagttctgaagccaggaaagatgtggttgctggggtcggactgggcctggaccttctatcctgaccctgtggtgctgggcaggtcacttccactccctagacctcacatggtggataatgagaatggtgacgtcctcgtggggctgccatgagggtcacggaccttgtccaccatcagtgcagtttcggccctagtcaacgtcacagaaaacagcaagcagagatcttgggctgaggcccgtcagggctaatggctggcattacttagactgggttccctggcagccaagccaaaaagggaaatcgggcagtaactaactgctgtgtaaggccagactggcagacctgcctctccccagcgacccgtcctccacacagtggtcctgcttggggtcaagcccagacactctgggctgatccctcccaagcccaagcccttgttcagcatctccaggacccctgagctgtgtagctgtcaggatctacctttattcgccccatgtcctgacgcccagcacatagcagataaccggcacatccccacagggcggcagggtcaggccatcacgctggtgacacagtacgacatccacctggtgcacgccatcgaggagcagatcagtgagtggggttggggtgggtggtagagaaggaggggtggggtgggcagaggtgggcacctcggggtgagacccattttcccgtcagacaccagccggcctgctcccgtgagcagatttaggctggggcttccttccctaggcacccccaaaagaagttcttttgcccatttattgaaacaaactccccatagttgtcgccagcagctgaaagccacatcagtcaggaggggacttgggtttcttagactgagatgtatggaaggtccctgagatgtcagaggccccattgacagggcctggcctgctaaaaacccctgggaatggtttcatatgcagccaagacagagacacttcctaaggtatctctgatcactgcatagactgtcctgaaatttagaaacatctggacttggccaggcacagtggctcacacttgtaatcctagcactttgagaggccgaggtgggcggatcacttgagcccaggagttcaagaccaacctgggcaacatggtgaaaccccgtctctactaaaaatacaaaaattagccaggtgtggtggcgcacgcctgtaattgcagctacttgggagggtgaggcatgagaattacttgaacccgggaggcaaaggttgcagtgagccaaggtcgcgccattacgctccagcctgggtgacagtgagactctgtctcaaaaaaaaaaaaaaaaaaaaaaagagaaacatctggactttaaggccgggcacggtggctcacacctgtaatcccagcactttgggaggccaaggtgggtggatcacttgagcccaggagtttgagatcagcctgggcaatgtggagaaaccctgcctctccaaaaaatatagaaactagcagcacacgcccgtagttccaactactcaagaggctgaggttggaagattgcttgagcggaggctacagtgacctgattgagccaccacgctccagcatgggcgacagagtaagaccctgtcttcaaaaaaaaagaaagaaatatctggactttaaaggacactgtttgcaagaaattaatattcatggttaaactcataatgctgctaacaccgaaaaaaaatggcggggggaggctgaggcatgagaattacttgaacccgggaggcggatgttgcagtgagccgagatagtgccactgcactccagcttgggtgaccgtgagactctgaaagacagcggtccataccttccttacctcagaaatccctgatcttgctcagctgacccttacctgatatggccccagatggccttgcataccccacagcatggggaactcactacttggctgaactccctctccatgtcacgtctcctccccacccccacccccggctttgctgtccccacagagaagaagctggaggagttctccgtggaagaggccgaggtgctacagatcctcacacaggtcaacgtggtgcgaagagagtgtgagatcgtgagtgtcagaggcgggcaggaactaaagtgctctccagggccgggggtgctcccttccaggtggggcccccgtgaccagcatctccttaccccacttccctccaccagaaactggaggcggcccactttgacgaaaagaaggagatcaacaaacggaagcagctgatcctggaggggaaggtgagggccgagcccgcaggtagggggtgggtggccaggttccctggcgggggccgccagctcagccatcccctggtcctccctgtgccaggaccctgacctggaggccaagcgcaaggctgagctggccaagatcaagcagaagaaccggcgcttcaaggagaaggtggaggagacgctgaagcgacagaaggctggcagggctggccacaaggggcgtccacccaggacaccgtctgggtcccactcaggcccagtcccctcccagggcctggtctgagccccacacggccatctgcccagtccttgactcgtccatggagctgagggtcggaggaaccttccttgggggcagcagcccttcccgggggcctacccagtgccccacagcagaacccgtgggcgctcgtgttgtgcgggccctgctcctctgccccgaaaccactggctggtcccttccctgagccctggccaagattcaggctgcaggggaagaaagaacatgaccgggaggttgtgaccccaacccaaggtcaccccccaggggtgccgcatacaggaggtgcttaataaacgggtcttttgacttcctcagtctgactttcgaagagcagggggacaggagaggtggggtgcagccgctgttgtttctcaggtgtctgcccagaacaccatgtccatttccaccaggcaggcccaaagttttgcagacaccagctgctcgaatggccatgggattttgggccctgaagccccttctctgggcttccagtttcctcatctggagaatgggcatagcaactgccctgctctccagaggcagctgtgaggctttggtgaggtcagtcctgtgccgaatgggtgcagctataagcttccctggccacccacctggccacatctggggtttgtggccagagtgaaggggccatgaaagtccaaatttggccagacaatgtgggctaagcccaaggggacaggcagagagacaccagagccagcttcctggctgtgtggcctggacccccctcggactccaagcctcacccctcatctgcaagcggcttataactgctacatggattcaggggcacccaaaaagacgcagggaaaggcgccggcgacatgttaagtgcccagatacccacataccacacacacacagccacgcttagaaatgtaatcgggggatctagaaattctacacaatgagaagctcaaaaacagccccaaagctgccaacaaccagagccgactggggcccaccccagcccagcccggcccggcccacccagggctaagttgggaccccccagtccctttccaggacgaatgggcccaactatgccgcctgcagcctggcccgcatcccaggccggaatcgttcatagaaaaccagccccggctcagggcgcagcctcagccaggcgggccaggccctcacgcagctcactcagctcaaacaggctgacgtccagcagctgcgctgcccggcccacctcagcccgcgcccgctcccgctctgcccgtgcctcctccaggctgcgctccatcgcccgcagctggtgctccaactccgcattgcgggtctccaggtcctgccaggaaagggtgggcagggttgggggccccaacaaatcaccagtcctgcccgaggcatccagagtctgaccaccttcatgtccctcttctgcccagagccatcctagggcgcccaacacaccaggaataaaatgcacaccccacaggggcctagcttctgccctcatttcttttgtttgtttgtttgtttttgagaaggagtttcgctcttgtcgcccaggctggagtgcaatggcgtgatctcggctcactacaacctccgcctcccaggttcaagcaattctcctgcctcagcctcccaagtagctgggattacaggcatacaccaccacgcccagtgatggcttacacctgtaatcccagaactttgggaggcggaggcaggtggatcccctgaggtcaggagttcaagaccagcttggccaacatggtaaaactccatctctactaaaaatacaaaaattagctgggcatggtggtgcacacctgtagtcccagctactctggaggctgaggcaggagaatcgcttgagctcagaaggcggagcttgcagtgagccgagatcgcgccactgcactccagcctgggtgacagagtgagactccatctcaaaaaaaaaaaaaaaaggctgggcgcagtggtttacgcctataatcccagcactttgggaggccgaggcgagtggatcataaggtcaagagatcgagactatcctggctaacatggtgaaaccccgtctctaccaaaaaatacaaaaaattagccgggcatggtggcgagcacctgtagttccagctactcgggaggctgaggcaggagaatggagtgaacctgggaggcggagcttgcgccactgcactccagcctgggcaacagagtgagactccgtctcaaaaaaaaaaaaaagtaccccctgaacatttctcagataaagcctttagcaaaagccaagccaaggccagtcgtggtgactcaagcctataatcccagcactttgggaggctgagggcagattgctcacggtcaggagttcgagaccagtctggccaacatgaggaaaccccatctctactaaaaacacaaaaaatgcccgggcacggtggcgcatgtctgtaatcccagcactttgggaggccgaggcgggcaaatcatgagatcaggagttgagaccagcctggccaacatggtgaaaccctgtctctactaaaaatacaaaaaattagctgggtgtagtggcgggcgcctgtaatcccagctactcaggaggctgaggcaggagaattgcttcaacccgggaggtggaggttgcagtgagctgagatcgtgccattgcactccagcctgggcaacagagcgagactccatctcaaagaattaaaaaaaaataaagccaagccaagccagacctagttccaatgcaggctctgtgatctcaggctgagaacaggaggaattgacggggtctggcatgggaatacagcaggaactcaagcattgcttgttgaacccatagatggatatgaaactgtaccaacagccactgttcacgcggcacctgctgggcatcaggccttccacaggactgggcctcccaatactttatcatcttaggtagatattgtcctgagtgtctgttgaggtgactgtcacccaccgtcaccccacctccttgtgcccacacacacctgcaccttctgctgagtctcctcacgctcggcagcctccagggcctcgcggggccccccagtctgactcttcagggtctgaatctcctagaggagaagagttcccagggtctgttgcgggggtcctggctttcccacaggaggtgagggaaggcgaggcccaggaaccacacttggcactcacctggtccttggtttgcaccagagcttccagctgttccagcgactggccctggcccagcccctccttctcaccggtgggggtcacctctgaagctgcctgagcctccagctcagccacctgtagggcaggaatagcagcccctgacgcccccgcctgcactctcccttgctcgcccaacctctagggaatctgcctcctgtctggccacgcccaggaccgagcacccatctcccttggttggtgccaccacccccctctgcacagcttggactttagtgtctgatcaccctctgaggctggcattgtctcaaacccattttacagagcaagaaactgaggctgggtcagtgacctgctgaggtcacacagctagtccatgaacccagggcagatgggaactgccgaggcgcggtctccacagttgcccgggccaggtgggggtctctcggagggaggggtgccctcacccgctgccgcagccgctcggcctctgcacgctgagcctccagctgctgcctccactgggctgcggcggcgttggcctctcgcagggcgcctgccagcttgttgttgctgtcctgcagtgcgaaaaactcggcctcccactgtacctcgcccacggagctgcagagacacgagggtcggcagtgggtgacacggggctggggggcggagtcgggcgatgctgggctagggggcggggccaggggtgggatagctctgggcttaggtcagggcgaaggctggcgagggtgcggagtcgtgcgcgaagttggactagggggcggggcaggggtggagtggcactgggctgggggcggagtcagcggcaatgctcggttagggggcggggccagggtgggtggcgctgggctgaggcggagtcacgggcgatgctgggctagggggcggggccagaggaggggtggctttgggctagggcacggagtcagggccacgcagggctggggatgtggcgacactgattgctgagcttggggatggggcagtcccgcagaagcggggtcttgtcgaggaccgagtcaaagaagggggcacgtggagtccgcccagtgacactgtgggaatgttgagggagggatgggaggttggggagagtcagccgatgggggcgtggtcagggtggttatcctaagaccagagaggcatcgacggggcgaggttagcagcgagaagagacagggatggggtcaaaacagaggggcgtggccaacgcagggtaggggcggggtcggctctggatggggcagcattcagatcctcatccccttccccaggtcttgagtccacagttagatcccgccgtcctggcactcccttggcttccaagaaccgcctcctcgtcccccacccctacccccgcccctgccacgcccccaagtcccgcccctcacccctcagacaacatcttctttagccgctcgcgctctgtggggccgggggcatcagcgctctggctgcggaacagtttttcctcgccggggccgttggcactgacgagagggctcgggggcacctaggcacggggaaaagaataggtcacgaccccacatcagctgggatcaaggctgatgtgactggggtcgtcacatcgggggtgcaattgacctatgcaccctaagcaggtccttcacagcacaggatccaagtgtgtccctccccacctcacccaccctccatggctccctgtggcccctaagctgggagttccatgcccacgccctcgaccttgccttcctgggctttcaccacccccaggagcaagtctgatgcaggttagtctaaaccaagatacttagaacctgtaaggtaggggaggggtacaatcggacacctccctgctgttcccttccctgaggccgaacttcaacatcacgtttaggatttcagcaggaagccctgcccaggccgaattcgtgtttcgtgagcaaccccactgcctggaccactggctctgagggtagacaagctggcgggtgccctgcgagaggccagcgccaccgcagcccagtgcaggcagcagctggaggctcatgctttttttcatctctccaacccctgtgcacagccctcggcctggtacacagcaggtgctcaataaataatgctgaataaattaatgtgggaaaacacgcagggacagttcgttgttctgcctcacacttagccatttctttctttctttttttttttgagacagagtcacactctgtcacccaggctggagtgcagtggcacgatctcggctcactgcaacctccatctcctgggttcaagcgattctcctgcctcagcctcccgagtagctgggactacaggcgcatgccaccacgcctggctaatttttgtattttttagcagaggtggagtatcaccatgttggccaggctggtctcgaactcttggcctcaagtcatcctccctcctcagcctcccaaattgctgggattacaggcgtgagccaccgcacccggccacacttagccatttcaatttctagtcttccatcctgccatctgagctggttttgctactgggacctactgggtgtaccccaccggccccaggcaaggtccagaccctctatgacacactccacaccactcctctgtggtccctgctgtgggtctaaccttaggtcatctggaagcattgggtcttgacgaccagcagagtgccccggtctcccaatatcaaggtcccccaatatcagttgagcgcctggctgactcacaggtgcccaggcaggcataggggagtagggagtgctgacctggtgggaggcgagccccagggctggactggtgagctccccgccatcctgagatttctccctggccagcctggctgcttccttcacttcctggaacttctcggcaaactaagggagtggggaggaaaagacagtaaaaccccagcccatcctcccaaacaggtcaccatcactcagtgacagccccgccactttcgaaccgtacccatccccttatcacacaccttggaagaaggagagaaactttgaaaaatgatgtaccatggtgggtgggcaggtggcatcagatcacagaggtggcatttaaatacattgggccacattgagaaagggaaaggaattcccatgtcctctttttaggaaagggtctcactttgtcacccaggctgcagtacagtggcatgatctcggctcactgcagccttgacctccctggctcaagtgacccttccaccttacccctccaccaaggagctgggactacaggtgtgtgccatcatgcccggctaattttttctagagacggggtctagccatgttccccagaatggcccttttcctgttttttgttttttttttttttgagatggagtcttgctctgttgcccaggctggagtgcagtgacatgatcttggctcacggcagcctctgcttcagcctcatgagtagctgggattacaggcatgcaccagcatgcctggctaattttcatatttttagtagagatgtggttttaccatgttggccaggctgatcttaaattcccggcttgaagtgatccgcctgcctcagcctcccaaagtggtgggattacaggcacagcacccagccttttttttttttttttttggggggggacagaatctcgctttgtcaccctggctggagtgcagtggcaccatctcagctcactgcaacctctgcctcccaggttcaagcgagtcttctgcctcaacctcccgagtagctaggactacaggcccgtgccaccacgcccagctaatttttgtatttagtacagatggggtttcaccatattggccatgctggtctcgaactcctgaccccgtgatccacccacctcggcctcccaaagtgtgagaatgacaggtatgagccaacatgtggggtcccttttaatctttatcagggctatttcaacaaagagagcctcaggtgggtgctaatctgtctttaacacctgttattattcctttataacaaagagattaggtctcaggctctgagagacatcagaagtcaatgagaaagtaatcatctcattcttgtttttgttgtattaaatgtttacatgtttacatttaccacctatttatgacaaagcaataccagttttccagttaggataggatatgtttccccccaccaccccggttttaaaataaatttccttagtttaaaaataattttttaggccgggtgcggtggctcacacctgtaatcccagcactttgggagaccaaggcgggcggatcatttgaggtcaggagttcgaaaccagcctggccaacatggtgaaaccccatctctactaaaaacacaaaaattagccaggcatggtggtgggcgcctgtaatcctagtacttgggaggctgaggcaggagaattgcttgagcccaggaggtggaggttgcagtgagctgagattgtgccattgcactccagcctgggtgacagagcaaaactctgtctcaaaataaatagataaggccatgtgtggtggctcacgcttgtaatcccagcactttgggaggccgaggcaggtggatcatgaggtcaggagttcaagagcaggctgaccaacatggtgaaaccccatgtctactaaaaatacaaaatcagccaggcatggtggcacatgactgtaatcccagctacttgggaggctgaggaaggagaattgcttgaaccggggaggcggaagttgcggtgagccgagatcgcaccattgcactccagcctgggggacaagagtgaaactctgtctcaaaaaaataaataaataaataaataaataaatgattttttaggctgggtgcagtggctcacacctgtaatcccatcactttgggagcctgaggcaggcggattacctgaagtcaggagtttgagaccagcctggccaacatagtgaaaccctgtctctgctaagaatacaaaaattaaaaaaacaaaaattttgtaaaaatacaaaaattagccaggtgtggtgtgtctgtaatcccaactacttgggaagctgaggcaggagaattgcttgaacctggagagaagaggttgcagtgagccgagatcgggccactgcactccagcctggcaacagagctagactctgtctccaaaaaaaaaaaaaagacctaaattagaaaggtaaattgttggggccgggcgcggtggctcacacctgtaatcccagcactttgggaggccaaggtgggtggatcacgaggtcaggagatcgagaccatcctggctaacacggtgaaacccccgtctctattaaaaatacaaaaaaaattagcagggcgtggtggcaggcgcctgtagtcccagctactagggaggctgaggcagaagaatcagaagaatggtgtgaacctgggaggcagagcttgcagtgagccaagatcgcgccactgcactccagcctgtgcgacagagcgagactccgtctcaaaaaaaaaaaaaaaagtaaattgtctgggtgcagtggctcaagcctgtaatcccagcactttaggaggccaaagtgagaggctcgcttgaggccaggagtcaagaacagcctggacaacatagtgagatcctatctctaaaaaaaataagattaaagatattagctaggcatggtggcatacgcctatagtctcagctagtcaggaggctgaggtgggaggatcccttgtgcccaggagtttgaggctgcagtgagccatgattgcactgcttcactccagcctggacagcagagcaagatcttgttaaaaaaaaaaaaaaaaagaagggagggagggagggaaaaaaaaagaagaaaggtaaattctaaaccttctagaagaaaacaaagaaagcctggtgtggtagctcatgcctgtaatcccagcactttgggaggccgaggcaggtggatcatctgaggtcaggagttcaagaccaccctggccaacaaaatcccatctccactaaaaatacaaaaattagctgggcgaggtggtgggcacctgtaatcccagctactccagaggctgaggcaggagaatcgcttgaacccgggaggtggaggttgcagtgagccgagatcgtgccactgcactccagcctgggggacagagcaaggcattatctccaaaaaaaaaaaaaaaaaaagaagaagatcttcgtgaaagcactcatcatcaacaaaaccacggataaagataataatggaagtatagagacggcacagggtgcagggaggtgaggatgaaggtattgctggggcatgtgggaaagtgcccagcccagcccagccacccatttgatgtcccaaagaggagcagggtgtgtccaaaattagagctacaggcagtagaactaggactcaagagcaggtacagtggctcatgcctgtaattgcagcactttgggaggccgaggcaggcagatcatttcaggtcaggagttcgagaccagcctggccaacatggtgaaaccctgtctctaataaaatacaaaaaattagctgggcgtggtggcggactcctgtagtcccagctactcaggaggctgaggcaggagaatcgcttgaacccgggaggcggaggttgcgtgagccaagatcactgcagcctatctcaaaaaaaaaacagaaaaatgaactaggaatcaaaccggggaagcttaaaggggcttcagtctcaactcatcctacaatcccatcctgcagatgggaagataggggacctgcccaagatcccagagtgagcccaggagaagacttgggcccagtctcatcggttccctccactctccccctcacccggcccacctgtgtcagatgctgttcagaggcaaagcccaggccgtagactgtgttggcgcgactgtcggcccactgcccgaacttctgggaagttttggtgaaggtcatgttgggagtgacagtgctgttgatgatggcctagggtcggggaacaaagttcaaggtagatgggacagatactaacaaacatgaaaccccccaggtattaccttgtattagggtcttgaaggtctttactctgaaccctttcaggagatagagactagggcctgggaaggcttagggtttcctgtcccttgggcacacagcaagccagccaccagacccaaggttgtcaccaggactcctggtgcctctgccccacccagaccccaccctgaccttggcgcctccgatgctgatgatgcggtacacattgcgggtggcatcgtagaaataggagacagtgagtgcgtgcttgcccgctgggatccagtttcgcttggtggctgggtcaatttggaacacgtgcgcccgtgtgctgaagattggctgctccctgcgtggggagagggtgtttggtgggggccaggcacccccacttagaaagctcagggccaggctgggggaggtgggagctcacctggctgtggacattggtcaggctgggatgggcaggctctagggggcagccagagaggtggcaggagcactggtttggcccctagggagagaggagggactatgagtgtccctcaggccaggctgagggaggccaagcaggttccatctcaggacccatcaccaggtgtgcccgtcatggaactttcaatcaaaaaggcaggagaggcccaaagtacacctggtgctttgggaggctgagtcaggaggatcctttgagcccaggagttcgagaccatcctgagcaacatggcgagaccccatctctaccaaaaatttaaacaattagctgggtgtggtggcatgtgcctgccgtcccagctactggggaggctgaggtgggaggatcacttgagcccaggaggtcaaggctgcagtgcagtgagctatggtcaggccactgcactccagcctggacaagagagtgagaccctgtctcaaaaaagaaagaaattataaaaagaaacaaaaaggtaagataattattatagataactcagagcaagcagaccccatctttctttgtctaggggaagcccccacaacaccctgtacaggagatggccctctgagaggagcctggtggccgctgacatccagatgtaaatttctcattgtcctggttattgcacccccgtgaagtcccctccatcccaggctgagctgtggaggccaaatctctgctgagttctttccaccacattcacccatgactggccagagcggggctctccaccaaaaaatggggcgttgagaggtgtgtagtaccaggagaccagttccccactacaccctgcagagggaccccacccccagcagctcccaccctagggcagaagcacaccttgaagtccagagtccaaatccccagggagcccccagccaagttaaaaagacaagatgtagacaaacagccaatcccaatgcccaccatgagggcagagcagaatccacactgggagaccagggctccccaacctccccattgggccattcagcaaccccgaatctgcaggggaccaaggaggagtttggaggagggggaagacaggtgggggaggggaggccctggcccagcggcctctgtggtcaaaggggggatgccccccctatcctgtcctgggcagctgctgtcctggtcacagggtctgaaaccggagcccctgagtgggggtggggcggcagctctggcctggactgggggcgggtcctgcgccgggtgggagttggggaacacaggggtccccggaacccaggcccttccggtccggcagctcctgctgcgacttgcagcgtttggggaaagttactcaccaactagtcatgcgcctcggatgccgccggccacggggctcccggaggggggtccgacaccgcccggtgcccgggatccccaatctggccggtggatgaggccccatcccatgcacccgagtgcgggggacgggggggttaatattaattcaggatcccatccccacccgaggcaggacacccagtgcacgccccaactccgggacgcgggctctgaccctggaacttccgagattcccgcgacgccccctgtctctgggtccagaacttcgggggacacctcttctgcctcctccaaccccaggtcggtaactccggggactcccttcgtgactcctcctctaactgggtccgggaccccggtcctccgcgttgtcctagactcctaaacttcgaggaccccctgccacccctccagtccctgggtccgggacgtccggacccctcccaccccagtaccccaccccaggtccgcagctttggggacctcttcgcagcctcctccaacgccgggtccagaactttgggaacctcccacgcagtcccctctcagaccctgaatccagaacttcgggacccccgcgctccctccagccctggaacttggggacccctcgcgccgctcccagtcccgggtccgaaacttctggggaacccccacgccctccccttggccctgggacttcgaggcccccgcgctcccagcgcaggctcggcaggccgggctcaccctgccaggtcggcgccccgcgagtgtccaggcgcgagtcgggtgcggcccccgcggcgctgactccgcgctgccgggcgccccgctcgctccctggctcccgggcccgcgccctccgcgccgccctccacgccgcccgtgcctttgtctgcgccgccgccgcccgcgccgcctccggtcccatcgcggccggtcccgacgcggccgccgcccgccccgcctccccgggccgccaaggccgccccgctgcgccccctgccggctttttgcactgggagagggtatgggggaggggataagggggaggggcgggggccgggactggggaagggacggaggattgagggagggggttaggggcggtggagggggagtgggggggggggttgcgtggggtcgggttgggagcagagggtggggacagagagacagacggagagggacatctgggatgagaaagagacccagaaacagagacacgggggagacaggcggagagataggaagcagatggagagagttgcacggacagcgatgtgacctcaccctcctgtcaccttctcaggagacagctgcctctgtccccactacctgaggtcataactttgggcctgtgagggaggtcaggtccctcccgggctgacatgggtggcccagtgaggttggggagggggcagtgggtctcagggtctgcatacagtaagtgctcaatgggtgttgccaggaaacggaagagatcaacttcgggagggaacgggaagcaagacaaagagagagaagcctctgttcccctgcccgtcccatccctaagcagggacgtctgtccacctctgtccctcccaagacgatggtaaaaatgcccacaatggttggattaaggttatctttgctgttgtttgagggttccaaaatccaaaggctgaggaaatgtctccaacgcatggttgcatcccctcagcctccactggcctgcgtttgtcacctctggtcacagggagcacccccttcccacacttgccaggagagcatccttccggagttgaactaggatccacctccccagccccaagcccatgtgtcccacttgtcaatcctggtgccgccccctctctggcaccgtctccaaaatcacacggtgcggcgccgttggttcgtttgtggacagaggtcctgcagctccctggaaccaaggcctgtggcgccctaaagctctgatcttacatttgagtttttcttttcttttcttttcttttttttgagacaaagtctcactctgttgcccaggctggagtgcagtggcacaatctcggcttactgcagcctctgcctcccagattcaagcaattctcctgcctcagcctcccgagtagttgggactacaggtgcatgccaccacacctggctgatttttgtatttttagtagagatggggtttcaccatgttggccagtctggtctcgaactcctgacctcaagtgatctgcccccctcggcttcccaaagtcctgggattacagacgtgagccaccacacctggccgacacttgagtgttttgacaacttcagagaggcttttgcttttcatctccaagacctctgctcctgtctcctttccctgttcctttatttctgtttccttctaagaagaatagtatatctgagctggcggttacattacattcaaattacctttaggtgaattccaggtcaggttgtttttggagattgactcctgcgccaagatctgagtcttcccccatccaggcctttgcccaaactgttccttccacctggaatgccctcgctgcaggcatctcttctgccttgtccttccaggctcagcgccaccaccctgtctcctcctccaggaagcctctctgactaccctggccttggaagggatcttgccctcccctgtcccaatccctgtgactcttttttttttcttttttaaagtttatttttagagacgaggtctcactatgttgcccaggctggtctcaaactcctaagctcaagtgatcctcccacctcggcctcccaaagtgctgggatgacaggtgtgagcccagaccctttctgtgactcttatgttacctgtttattacatgaccaggtctgggtgctcctctagggctggcccatccatcctgaagccccagtctgacccagcacaagagcgactgttcatcccacaggggaaactgaggcacagactcggtttccctggctgcttctaacttcacgaggcatctgcacaagggaaggatttggctctgttctcaggccggaagccacgaaatgcttgaacattgtggggagcaaagaaaataccgtctgttctgtgcaaaaaatgacttttccttattaccaacaaaataatggaaaaaataaaaaagtatctgggaaaggtgctggcatggccaaggcttctggaagctgcttagagtttgccaagtgcacaagtggggccctgtggctattttacaggggcggctgggcgaggggcccaggcagactttgccctttgtgtgggcagaaagcaacagtgaaagagacagtgaagggttgagttgctttcctgaacaccctctccggtctctgggaggggctgggacagggctggccttgagcagccccaacctgaagctggactagccaagtctacactgaggcactggcttcctcagtgtgggcctcagttttctcacctggaaaatgggccgatgcttgcagggcttctagtagagggagaaacatgaaggatttagtcaatatcagcagctgtcctctggggtgcctgccattaggttcgtgggcaaaggccctgccactctttgctgcagctgggaaaacagagtctgtgtctcagtttccctgctgggatgaatagtcactcttatgctgggtcagactgaggcttcaggatggatgggccagccctagaggagcacctagacctggtcatataataaacaggtaacataagagtcacagaaaggggctgggctcatgcctgtcatcccagcactttgagaggccgaggctggaggatcgcttgagctcaggagttcgagaccagcctgggcaacatagtgagacctcgtctctaacgagggctgccctgagctgctgcccccaccccagtctgggccctcttcttcctaggtctggaggcctctcttctaaagaactgggctgggtgcagtggctcatgcctgtaatcctagcactttgagaggctgaggcaggcagatcacctgaggtcaggagtttgggaccagcctggtcaaaacatggtgaaaccccgtctctactgaaaatacaaaaattagccggacgtgatggtgcacacctgtaatcccagctactcgggaggctgaggcaggagaattgcttgaactcaggaggcagaggttgcagtgaactgagatcaggtgactgtactccagcctgggtgacagaaggagactctgtctcaaaaacaaaaacaaaaaagggtgggggggagggaggaaggaaggaaggaacagacttgagatgtccttgcagggcaggcagaggccaccccaaggtgtctgactaggaaagcaactttcctttggggctgaaaaatggtgtgggagaatgagcttcccaccttaaaggggaaaccaagcgggagcctgaacagctcattcagcactaagaaaactgcatttgcagaatggcttttatggctcaggctctggtctctgcctagttagatctgacctagcctttggagtgaggctaaacagtctctcctctccagagactttctgtgccaccagagcagggacagtccacctgctcttcccgaaagctgggtgcccacctcccagtgaaggtcttggtgactacttcaggtctgtttattgtttatggcatgatttggttactgttcacctcttacatggatttgtccctgcacctagaacaagcctgacctgtgacagctttctttttttttggagatggagtctcactctgtcgccaggctggagtgcagtggcacaatctcggctcactgcaaccttcaattcctgggttcaagctattcttctgcctcagcctcccgagtagctgggattacaggcactcgccaccacacccagctaatttttgtatttttttttttagtagagacaggatttcaccatgttggccaggatggtctcaatctcctgacttcgtgatccgcccgccttggcctcccaaagtgctgggattacagacgtgagccaccgcccttggcccctgtgacagctttctatgagcactttcaggagtaggagatccccaggttccagctttcgacttggctttcggaatcacgtgagccagggagtgaatcccagccctgctgcttaccagcagtgccaccctgaagaagtcactttcccttctttgtgcctcaggttccccatccataaaatgggcatacgaatggtgttcacttctgaggtttactgtagggatccaatgagttctttctttttcttttctttttttcttttgagacagaatcttgctctgtcacccaggctggagtgcagtggcgcaatctcggcttgctgcaatctctgccttccaggttcaagcaattcttctgcctcggcctccctagtagctgggattacaggcgcacgccaccacagccggctaaatttttgtgtttttagtagagacaggggtttcaccatgttggccaggctggtctccaactcctggactcaagtgatccacccgccttggcctcccaaactattgggattacagatgtgagccaccacgcccaccctttttctttcttttcttttcttttcttttttttttttttttgagacagggcctcactctgttgcccaggctgtagtgcagtggctcaatcatggctcactgcagcctcaactttctgggttcaagcaatccttccacctcagactcctgagtggctgagactacaggtgcacaccactacgcctggctaatttttgtattttttgtagagatggggtgtcactatgttgcccaggctggtctccaactcctggactcaagagatctgcctgcctcagcctctcaaagggctgggataacagatgtaagccactgcatctggcctccaatgagttgttatgtgaagagaacgtgattgtaggtgcttaataaatgcttgctgttataaacatcatatttatttttggtatgtggttttgatcctgaaccaacctcttactcttttctttttcagaagttagaggactccaaccaggcctgaactctcaaggacagaaatgggtccaacctggcatgacatcctctaaatctttagctcctggcctctcaggtgccccctccagctacctccctcttccttctcttcattccccaagccatagctggttgggccaacctccagacattagcctctttgcaaactcctattcatccctcaaagcctcaccttcaatgctctcctccccaagaagctctctcctctacctctagaccttttccagccctcttccctctttctggcccagccctgactcctgggagtgtctgtgtgcagctttgactcccccagcctgagtgtctctcaagggctgagaccagggcccatgtttccctagagtttgtcatcttccagcatagtgtggacgcatgggggtcaggcaaagggggagtttgatgactcagtactattggtgattttgcatcacttgaaggagaccctgccttaaattcagaacttgacttctgcccacggctaaagttaattcattcaacaaccccccatgaagcaatggagccaggctccctcaggcccaggcaagaaagggtcgtggagttggggtcgccagcactggtttatggatttgaggacctaggaccagagtgagttggggatgggaggaggcagtgcttgaggcccctctgagcagcaaacctggacccgaggttcagttcccgcagacctaattaccctaatttgccacatgcactaattacctcctgggtgccaggtggctgggcggggctgccccaatttccggaggtaggtcggggcccgattatttttggctgtggcgtccttgaagcctccgccatcagcagcgcttgaagggcagaaagtggggcggagaaattgaggccacatcaggggaggcactgcgggaattgggggtcggctggccttggagctccctgaacagggggccttgggcccaaggcctgagagtctttggcacctagccagaggtggcaagatctggaggggcatggccaggcacgatggctcacacctgtaatcccagcactttgggaggctgaggcaggtggatcacgaggtcaggagttcaacaccagcctggccaatgtggtgaaaccctgtctctattaaaaatataaaaaattagccgggcgtggtggtgcattcctgtagtcccagctactcaggaggctgaggcaagagaatcgcttgaacttgggaggcagaggttgcagtgagccgagatcgcgccactgtactctagcctgggcgggagagcgagactcttgtctcaaaaaaaaaaaaaaaaaaaaatctggaggggttgagaatcagccagctccatggtggattggtttgaagtctttttgttttgttttgagacagagtctcgctgtcatccaggccagagtgcagtggcacaatctcggctcactgcaatctccccctctcaggttcaagcaattctgctgcctcagcctcccgagtagctgggactacaggtgcgtgccgccacacccaactaattttttcatttttagtagagatggagtttcaccatgttggccaggctggtcttgaacacctaacttcaagtgatccgcctgcctgggcctcccaaattgctgggattacaggcgtgagacaccacgcccggcccaggtctgtttttgatgtgataccatggccgggaaaggggctgccagggggtgggagtgggggtagtcagatgggcctggtttcatatcccaagtcccaccagcttgctgtgtgttcctgggcatataacctttcatgaactctttgcacctttcctgagggatgaaacaggtgtaatttaaaaagggtgctttaggcactgggggtcggagcatgggcaaaggccctgaggtggggccaggcaggacatgttgctggtacattagacaggtgtctagagtggagtaagtgggagaaaagcttatgggactgctgagacctagggggtcacaggaactgagcagagccttgtgggtcttggtgagttgtgtgggtttcattctgaaggcactggggagccatggggagtttggagccagagagagagggagtggtcacattgacactgcaggccctgggcagggtttcagctcttaggaaagaacgaggtgtctgtccatgtgcagaatggtcgcagaccctaccattctctgagcctcagtttccccaccctgagcagagtcctgagactagggcagccccagaacacagtgagccctctgccggggaagccccactctaccctggagctcccaaatgctggctgtgcagcctacacggcctcctccccgcctgtccccccatcccacgctccttctgtggccttgggggagcagctgtgggaacagagagcagaagcccgtggggaaggcagctcagagggcctctgggggccgtgttcctgcttggtgacagcccacgtggggctgccgcgcgccgaatgttctcacagcagccaggtgactcacatgctacagcctcttccctgggtctgccagagggagagtattcctagtccccaggcacaggccggggtctctggtttggccacctgtgccctggctatgccctctaggatcccccccaccaacacacaccaagggacccctctaactggcgatgctgcccacctccttgctccagcatcttccgtggctctcctggacacctcagagagaggctcaagctcctcattgcccattggtcaagctgctcagccccacttcagagcacttgtactgggtcccacgtatggcctgaaatgccagctctaaggccatctcctccaggaagccttccagccctccccacaactctgacaatcctgacccccaggacgaggatgcgtctgtgtctggccctgcctccctcccagactgggggctaactggagtccaggcccaggacccaggcctctcaggggctccactgttatccagtataggagtgcacagcaggggctctgggggaggaaggcaaggtccaagtctggaccccatgggcctgacatgtaaccaaattatttatgtatttatttatttttatttatttattttttttgagacagagtctcactctgccacccaggctggagtgcagtggcgcgatctcggctcactgcaacctccatctgacaggttcaagcaattctcgtgcctccgcctcctgagtagctgggactacaggcacgtgccaccacacccggctaaattttttttgtatttttagtagagacggggtttcactgtgttagccacaatggtctcgatttcctgacctcgtgatccgcccgcctcggccttccaaagtgctgagattacaggcatgagccaccacgcccggcattaatttttattttttgagagacaaggtctaactctgccgcccaggctggagtgcagtggtgcgatctcagctcactgcagcctcagcctcttgggctcaagcgattctcctgcctcagcctcccgagtcactgggattagaggtgtgagccaccaagcctggctaattttttaatattttgtagagatggggtcttcctatgttgtccaagctgctctctaactcctgggctcaagcaatcctcctgccttagcctcccacagtgcggagattacaggcataagccactgcacctagctaacccatttcatagaagagaaaactgaggctcagggagcttgtcagttccccaaagtaaaagtcagcagaaggctggaggtggtagctcatgcctgtaatcccagctctttgggaggcggaggcaggctgctcacctgaggtcaggagttcaagaccagcctggccaacatggtgaaaccccatctctacaaaaatacaaaaaaatgggccggccatggtggctcatacctgtaatcccagcactttgggaggccgaggtgggcagatcacaaggtcaggagataaagaccatcctggctaacacggtgaaaccccgtctctactaaaaatacaaaaaattagccaggcatggtgacaggcgcctgtagccccagctactggggaggctgaggcaggagaatgatgtgaacccgagaggtggagcttgcagtgagccgagatcgtgccactgcactccagcctgggtgacagagcaagactccgtctcaaaaaaaaaaaaaaaaaagaaaaagaaaaaaataaccaggcatggtagctcatgcctatactcccagcactttgggaggccgaggtgggtgaatcacctgagatcaggagttcaagaccagcctgaccaacatggtgaaaccctgtctatactaaaaatacaaaaattagctcagtgtggtggcacacgcctgtagtcccagctactcgggaggctgcggcaggataatcacttgaacccttgaacccgggaggcagaggttgcagtgagccaagatcacgccattgcactccagcttgggtgaccgagtgagacttcatcttaaaaaaaaaaaaaaaaaggccgggcatggcggctcacgcctgtaatctcagcactttgggaagccgaggcgggtggatcacgaggtcaggagatcgaggccatcctgactaacacgatgaaaccccgtttctactaaaaatacaaaaaattagccgagcgtggtggcaggcgcctgtagtcccagctacttgggaagctgaggcaggagaatggcgtgaacctgggaggtggagcttgcagtgagccgagatcacgccactgcactccagcctgggcaacagagcgagactctgtctcaaaaaaaaaaaaaaaaaagtcaccaggaggctggaggtggtggctcattcctgtaatcccagcactttgggaggccaaaccaggcagatcacttgaggtcaggaattcgagaccggcctggccaacatggcaaaaacctgcctctagtaaaaacacaaaaagtaacccgggcatggtggtgtgcacctgtaaccccagctactcaggaggctgaggtgggagaattgcttgaacccaggagtcagaggttgcagtgagcccagatcacaccactccactccagcctggacgacagagtgagactttgtctcaaaacaacaacaacaaaaagtcagcagagaggaaaggctggtcctggaaccccagtctgagaggccaagtctgctccttgcaacctctggagctttgcttacccagggagcaggttggggggtttgctcatccacctgcaggtggatttggtgcagcctgggctcaaactcaaggggtccaacagcccttcctccctgagcctctgtttcctcctctgtaaagcaaggattattcatcattaactcatgtttattaagcacttaaggcatccaggtctgttaggacaccctgccctcagggacctcatgtctggtagacaagggaacgaggaaatgacttctgacaggattttgcaaaagaaagaaaaccaggcaaagcaccaggtcaagactgcagtggttgctgaaggctactttgtggaggtggtgattcagggcaatagcacgcccaaaggccctgaggcagggatgtgttcagccccttgggacagcattgaggaggcggctgtgactgaagcaaagtgagttgggcagagtggggagggcaccatgtaggcagggagggctacaggctgggcatcagggacctgtgggtccccaggaaggaatgcagactttatacttagagcactggggagccacataaggcttttgagcaggagagggcatgatctgctttttttttttttttttttagacaaggtctcacgctttcacccaggctgaagtgcagtggcgtgatcatggctcactgcagcttcgacctcctggtctcagatgatcctcccacctcagcctcccaggtagctgggactacaggtgtgcgccactatacccagttgtgatcttcttttgtgtttaaatatttgcagccgggtgcgatggctcatgtctgtaatcccagcactttgggaggccgaggcaggaggatcacttgagtccaggagttcgagaccagcctggccaacgtggtgaaaccctatctctactaaaaatacaaaaattagccaggtgtgatggtgcatgcctgtggtcccagctattcgggaggctgaggcaggaaaatcgcttgaacctgggaggtggaggttgcagtgagccgagatggcagcattgcacaacagtctgggaaatagcaagactgtctcaaaaaaaaaaaaaaaaaaaaagatttgcagccaggcacagtggctcacacctgtaatcccagggcctgagggaggaaacttgtcttcataaaccctttcccatcttcctctgtctctcacgaggtcctggatgctggcctccgggtcttatcgctgaaatctcaggcctccaacagcagggaaacatctgctttccggagttcaaggatcttccagcccggacggaggtcacagggaaggaggatcgctgaaacaaagagaaagggtcacacgttgggcgctgactgcatcaacaggggagacactggccaggtgcggtggctcactcctctaatcccagcactttgggaggccgaggtgggtggatcatttgaggtcaggagtttgagacaagcctggacaacatggtgaaaccctatctctactaaaaatacaaaaaaaaaaaattagccgggcattgtggcacacacctgtaatcccagctactcaggaggctgagtcaagagaatcgcttgaacctgggaggcggaggtttcagtgagccaagatcacgccactgcactccagcctgggtgacagagtgagactccacctcagaaaaataaaaacacacaaacaaaaattagccgggcgtggtggcacacatctgtagtcctaactactggggaggctgaaacaggacaactgcttgagcccaggaggtcaaggctgcagtgagctcaaattgcaccgctgcactctagcgtgggggacagagcgagacctgtcttgaaaaacaacaaagaaaaaaaaaaagaaaaacaacaaagaaacaaatcccaaagtcaatggggaccagagtctggggaagggtgtcagtacacccacatcttggggtcccccctaacaccttggggtccctcaggctttggcatctatcctgggacccaggagggatatagctgctggtggctgggccaagcccttggtggtaaccccactgttctggggggtaccatccagggaggtcatgaccagtagctgaggggttcctgcagggcccttccaggtggtaggtgctcaggagttggctgttaacaggtcaggagagtgagaaacagaaagaaacatagacatacagacttggagagcagttgcttgggggctggcctctcgcttctagatgagaccctctcctggggggccactcagagtccatctgggacaccacagccatgcccacatgcaaaacagacattgtgtaactggccagtgacctccaactcacatctgccagagccctccaccttctagcagtcacagggcccagggtgggtgttgagcagcatctggacctggctcgaaggcagctgtctggagtcctgtgggaggaggggctggcccttgaaaaggcacctggggagaccaggttggatacagggatgcaaggcacaggcgcactagggccactaccagtgtgacagtctacactgggctcttcgaagggtaggcggggtgcttagagagtgttggggctcaagctacacctttccacttcctcacatgttcatgcacccactcaatgcctatccatccatccacccacccatccacccacccatccactcattcgcccatccatccatccatccatccatccatccatccatccacccacccatctgcctgtccgtccatccatccatccatccatccatccacccacccacccagccatccatccatccatacacctatccatcttcccatccatccaaccatctatccgtccacccattcttccattcatccatccatccatccatccacccacccatccatccatccatacacctattcatctgcccatccatccactcatccacccacccatccatccatccatacacccatccatcttcccatccatccaaccatccatccatccacccatttacccatccatccacatatccacctacccatccatccattcacctatccatcttcccatccatccaaccatccatccacccacccatccacccatccacccatccatccatccacccacccatccatccatccatacacctatccatctgcccatccatccacccatccacccacccatccagccatccatacacccatccaccttcccaaccatccatccatccatccacccatccacccatccatccatccacccatccacccatccatccatccacccgcccatccatccatgcatacacccatccatctccccaaccatccaaccatccaatcatctatccatccacccattcatccatccatccatccatccatccatccatccattcatccatccatccacccacccatccatccatccatacacctatccatctgcccatccatccacccatccacccacccatccatccatccatccacccatccacccatccatccatctatccatccatccattcacccagccatcttcccatccatccaactatccattcatccatttactattcatttatctatctatacacccatccatccaaccatccaaccgtgtgtacactcatcttcccatatattcatccattcatcgatccattatttatccatccatctgcccatccatctgcccagtcacccatccagtcatttatcttccatcccccatccatccccatccatcccaccattcaccaatcccccattcctatcccatccatccatgcttccatccatccaccctcatatgcaggcatcatccatgatccacccaactctacttccacttctcatacttctactcattcttcaagccccaactccatgtgccttcctccttgcagcccttggtgtggcccagaccctccctgtcccttcctctcacccaggcccaacccatggagcgaagagtgaatgcacctggctcagctttcagactggaggctgctcgagagcaaggcctgaggccgaggtttcttgggggcccagcagcaccagtgtgagggggcgccgaggagaagaccagcaatttctgcctgtgggccattgaggcatcaggcctccaggtcaggggggataccaccccacccaccaataataaagcccctgtgatttaagcccaataaaaaggcccggggaaggaattcaggcttggcctgaggccactctggggtcagcaagagctccagcgacagatatatctgggtttgtgctccactttgtcacatgtgcactgtgtgacactgaagaggtcagtttacctctctgagcctcagttttcccatttggaaatcaatctgtctcatgttaattgcacatttacaaggagttgaggcccacatcaggccccatcagctgggatgtatcagctccactccaggggaggggccaggaggagctggggtgaggagaacaggaagggaggttgagaaggtggatggggccaggcgcagtggcttatgcctataatcccaacacttttggaggctgaggcagaaggatcatttggggccaggagcttgagaccagcctgccaacatagcgagaccccatatctacaaaatataaaaagattagctgggcatgatagtgtacaccagtggtcccagctactcgggaggttgaagtgggaggatggcttgagcctaggaggtcgtggctgcagtgagccgtgatggcgcctctgtattccagtctggatgacagagtgaaaccctatctcaaaaaaaaaaaaaaaaaaaaaaaaaggtggatggcactggtggggggatgggaggggtgtgggacataggtgtatgtttcctaatggattcagagttccatattttctttttcttttcttcctttttttttttttttgagatgaagtctcactctgtcacccaggctggaatgcaatgggatgacctcggctcattgcaacctccgcctctcaggttcaagcaattctcctgcctcagcctcccgagtagctgggattacaggcacgcgccatcacgcccaactaatttttttttttttttttgagacagggtcttgctctgtcgcagagctggagtgcagtggcatgatcttggctcactgcaacctctgcttcctgggttcaagcgtttctcctacctcagcctccccagtagctgggattacaggcactcactactatgcccagctatttttttttttttatgtatttttagtagagacggggtttcaccatgttggtcaggctggtcttgaactcctgacctcattttctgcccacctcggccttccaaagtgctgggattacaggcgtgagccaccacacccagccaatttttgtattttttagtagagacggggtttcactatgttggcgaggctggtctcgaactcctgacctcaaatgatctgtccgcctcagtcttctaaagtgctgggattacaggcatgagccaccgtgccggcctcttttctgattctccaaataatgtatgctcattgtaaaaacagttttagaaagcacagacacgtgtaacgtaaataatctaaataggtcccttgtcatagcgtttaatttcctttctgaatttttaatacctatttactttatgcctggtgcttattggtaaattttaaaatgctggcacaggaaacaaactaagtaaacaaattcagatgccatccttgcccttggccctagctgacacggaccaggtgctctgtaaatatctgttgagtgaacaaaattttaaaaataaaatcaatgcccagaaataactgttactaacacgatggtctatttccatctagattttttttctttctttcttttttttcttagcccaaatggaattacactatacacatgatttgtcagtcaaggccaaattccagtgtacattcttgagttcagagacttcagcatcactcaccttgaagcttttctatggtttgttaaacagatctcctatggttggacatctaggtcactctctggggacagcctaacaaatagaataacacattttcttttttttttttttttttctgagacagtctcactctgtcgcccaggatggagtacagtggcgcaatctcggctcactgcaacctccacttcctgggttcaagtgattctcctgcctcagcctcccaagtagctgggactacaggcacccaccaccacggccggctaagttttgtgtttttagtagagatggggttttaccatgttggccaggctggtctcaaattcctgacctcaagtgatcaccggcctcggcctcccaaagtgttgagtttacaggcatgagccaccgagcccagccaaacacacgttttcaagttttctccttctccttttcctttttttttttttttttgagacaggggtctcagtatgttgcccgtctggagtgcagtggctattcacaggtgtgatcccactactgatcagcacaagaattttacctactcagtttccaacctgggccggttcacctctccttaggcaacctggtggtggtctcccgctccctgggaggtcaccatattgacaccaaacttactgtagtcacccaattggcatagtgcactacagcccagaactcccggattcaagtgattcttccacctcagtctcctgagtagctgggactacaggcattcatccctgaacccagcttttcagcatttttgatgaatacttaagaccacatcaccttccatacaggggaccttacttggctcccagcagtgatgggtgagtgtgtccatttctctgaatgtctgacatttgcaaatgaatgttagagatatttgctttgcaagatgtagattaaaatcagaagccataaaccaggcatggcgcctcgtgcctataatcccagcactttgggaggcccaggatggaggatcgcttgagtccaggagttcgagaccagcctgggcaacacagcaagatcctgtctctaccaaaaaaaagtttttgtttttgtttttgtttttttgagacagagtctcactctgtcatctaggctggagtgcaatggcacaatcttggtttactgcaacctccgtctcccaggttcaagcgattctctcgcctctgccttatgagtagctgggactacaggcacgcacgaccatgtccgactaatttttgtatttttagtagagacggggtttcaccatgttggccaggctggtcttgaactcccgacctcaggtgatttcgcccacctccttggcctcccaaagtgctgggattgattacacacgtttccaaacagtggatcccacaagaaaagaaggtgtcatcgtaggtgacagaatggaggtccctgtctgagggagggaccgctgagcctcaagtgagtaggctacaaggctggcagggaggtcaccccatcctatggcctaagattgtccccaaacataaagcttgaaccctgaggccccttgattggtttccttggtccttggccagcatttaaactctcctttttttaaatttcttgagacagtttctcactccgtcacccaggctagagtgcagggcacaatctcggctcactgcaacctctgcctgttgggttcaagtgattctcctgtctcagcccccatgagtagctggggctacagacatgcgccaccatgccctgctaatttttgtatttttagtagtaacagggtttcaccatgttgatcaggctggtcttgaactcctgacctcaagtgatccacctgcctcggcctctcaaaggtgctgggattacaagggtgagccaccgtgcccagcctacactctcttgacaaaggtttttataaatcccaatttggctgggtgccgtggctcatgcttgtaatcccagtactttgggaggctggggccaggggatcacttgagcccaggagattgagaccagtctggggcaacatggcaaaacccatctctacaaaaaataaaataaaattagccaggcatggtggtgcatgcctgtggtccaagcttcttaggaggctgatgtgggaggatcgcttgagcccaggaattagaggctgcagtgagccatgattgtgccactgtactccagcctgggtgacacagtgagaccctgtctcggaaaataaataaataaaagactgtctgggccaggtgccgaggctcacgcctgtaatcccagcactttgggaggctgaggcgggcagattgcttgagcctggtagtttgagaccagactggccatcatagtgaaatcccatctctactaaaaataaaaaaattagttgggtgtggtggcgcacaccgatagtcccagctacttgggagactaaggtgggagaatcacttgagcctgggatcaaggctgcagtgagccgtgatcaacctctgcactccagcctgtgtgacagagtgaggctctgtttcaaaacaccaccaatgacaagaaaacccatgaccgtccgggcgcggtggctcgtgcctgtaatcccagcactttgtgaggccgaggtggatggatcctgagatcaggggtttgagaccagcctggccaacatggtgaaaccccatcaccactaaagatacaaaaaattagtcgggcgtggtggcacgtacctgaaatcccagctacgtaggaggctgaggtaggagaatcgcttgaacccgggaggtggaggttgcagtgagccgagatcgtgccattgcactctagtctgggcaacagagcaagactccgtctcaaaaaaaaaaaaaaaaagaaaatccatgagcactcagacctgcagccagtgaaggcaaggtagagatgggaccccacccttcagcctgtgtcttacatttttagggggctaatttaatttagaatgtccagcagggaagtgtgtctagctgtccagtgaggggagcctcaagctatcttcccacctcagcctcccaaaccactgggattacaggcatgagtcactgtacctggcctgaaggtcccttttacagataagaaaactgaggttcagggccggcttctgcccctgcccaacctgctggcttcttcctcagccagccctctccaactactgcctatttctttttttctttctttctctttttttgagacggagtctcgctctgtcaacaaggctggagtgcaatggcatgatctcggcttactgcaacctctgcctcccaggttcaagtgattctcctgcctcagcctcctgagtagctgggattacaggcatgcaccaccatgcccgcataatttttttttttttttttttttgagacggagtctcgctctgtctcccaagctggagtgcagtggcgcgatctcggctcactgcaagctccgcctcccgggttcacgccattctcctgcctcagcctcccgagtagctggggctacaggcgcccgccaccacaccgggctaattttgtttttgtatttttagtagagacggggtttcaccgtgttagccaggatggtcttgatctcctgacctcgtgatccgcccgccttggcctcccaaagtgctgggattacaggcgtgagccacagcgcccggctctttttttttttttttttgagacagagtctcactgttgcccaggctggagtgcagttgcgccatctcggctcactgcaacctccgcctcctgagttcaagcgattctcctgccttggcctccctagtaggtgggattacaggcgtgcacaaccatgccctgttaatgtttgtatttttagtagagacgggatttcaccatgttggccaggctggtctcgaactcctgacctcaggtgatccacccgcctcagcctcccaaagtgttggaattacaagtgtgagccatcatggccagccactactgcctatttctgcatctcctgttccagacaaacggaagaaacaaggccatttattgagcgccggtgatatgctgagcgctcaacctgcatcctcaaagatcgtcgatccaacagcctgctaggagtggatcaatcgagtcacagagggggctcgacccccactcactgtagagaggggaaagctgaggttcagaggtgaaacgatactcccggggtcacacggcaaggacatgtaggggcaggttttgggacgaggctattcctgcatccacggtatagaaagaaggcggggcgcaaaggtcagccggtgctagggaccagacagcggcccatagggaggagtggacttgggtccaggatgcgcctgatggggcggggctatctttattgggtgggcagtgcaggaccaggctgccccatcaggtggaagcggggcgaagtgcacctgtgcagagggtttgggggcgtggctagaggctgagatgcgccgggtgggctggggctggggctggggctgggcggagcgggcggctcagcactgcagcggaagagctttcttgctacacgcagttgaggctaagctaccagcaggatgaaaggatcctgctgtgggtgatcgtgcacaaataaggctgcgaggtcacgtcgtccatgcactgagagaaacgagaggacccccggcctcagctcctagtccagcaaatggaggcaccatccttgactcctgtctgtgcctgtctgcgcctcagcaagcctcagtctccatatctgtcgaatgggcatgccatccccgagatggaagggaccttttgtgcaccagagctggtcccttccttgtgcccccacagcctcagaataaagccaaacacctcacctgtccaccctcaactccctccaccatcccccttattcactgtactccagccacaggcttcccagttggtctttgcacagggcaacaacattaccgccccagagcctttgcatatgctatctgagccgcctactctcagttcttccctatgactaactgctcctttaggagtcgactaaatgctaccatcctggccaaaatagcctcccctctctgcagtttcaaatccatggagggagtggattttgggctaactggatactactacaaaaaatatacatatatatgcccggtgcagtggctcacgcctgtaatcccagcactttgggaggccgaagcaggcgaatcacctgaggtcaggagttcgagacccatctggccaacatggcaaaaccccatctctactaaaaatacaaataaattagccggctatggtggcacacgcctgtaatcccagctacttgggaggctgaggcaggggaatcgcttgaaccggcgaggcggaggttgcaatgagccaagatcgcgccactgcactctctgggggatagagcgagactctgtctccaaaaaaataaaataataattccaaatggacctgagatgtgaatatgcaccctgcgaacactagaagaggctatgtgcagccaggtgtagtggcgcatgcctgtaatcctagcattttgggagactgaggcaggtggatcacctgaggtcaggagttcgagaccagcctggccaacatggtgaaacactgtctctactaaaaatacaaaaacttagccggtcatgatggcaggtgcctgtaatcccagctactccagaggctgacccagaagaattgcttgaacccgggaggcagaggttgcagtgagccgaggtcgtgccactgtaccccagcctgggcaacaagagcaaaactccgtctcaaaaaagaataataataataagagggtatgtgtgcatttctgtaaggtctgggaagggaaagagctttcataatgatcaatcagagcccaggagcaacaatgggaaggacgtgtgtattcatacatgtatgtgtgtgtgtaagagtaaaataggccgggtgcggtggctcatgcctgtaatcccagcactttgggaggccgaggcaggcagatcacttgaggtcaggagttcgagaccagcctggccaacatggtaaaccctgtgtctactaaaaatacaaaaattagccaggcatgatggtgcgtgcctgtaatcccaggcactcaggaggctgaggcatgagaatcacttgaacccaggaggcggaggtttcagtgagccgagatcacgccattgcactccagcctgggggtcacagcgagactctgtctaaaatacaaaaaacaaaaaaagagtaaaataaaacctttggccaggcacagtggctcatgcctgaaatcccaaagcctttgaaggctgaggcaagaggatcacttgaggccaggagttcgagatgaacctgggcaatatagcaagactctgtctctacaaaaaataaaaaattaactaggcacattggtacgtgcctgtagtcccagctatgcgtgaagctgaggtaggaggatcacttgagcccaggagtttgaggttacagtgagctgtgattgtgccactgcaactgcactccagcctgggagacagagtgagaacctgtctcaaaataataataataggccaggcctggtggctcacgactgtaatcccagaactttgggaggttgaggtgggcggatcatgaggtcaggagttcaacaccagcctggcaaacatggtgaaacccagtctctactgaaaatacaaaaattagccaggcgtggtggcgggtgcctgtaaccccatctactggggaggctgaggcaggagaatcgtttgaacccgggaggcagaggttgcagtgagatgacatcacgccattgcacttcagcctgggcgataagagcgagactccgtctcaaaaaacaaaaaacaacaccaaaacaacaaacaacaacaacaacaacaacaaaataataataataataataatgcattgaacaatgatcatgagttttaaaaaatgaaaaaaaccaaaacaaaacaatgagctggggccaggtgctgtggctcatacctataatcccagcactttgggaggttgtggtcgtgatacaggagatagaaattattttggcagacagtgagggtaaaagagtcctgggaatttctcttttaacaaaaagcagccccccaaatcatttctttctttttttaatttttattttttgagacggagtttcgttcttgtcacccaggctgtagtgcagtggcacgatcttggctcactgcaacctctgcctccctggttcaagcaattctgtctcagcctcccgagtagctgggattacaggcgtgtgccaccatgcccggctaatttttgtatttttagtagagacggggtttcaccatgttggccaggctggtctcaaactactgacttcaggcgatccacccacctcggcctcccaaagtgctgggattacaggcgtgagacactgtgcccggccttcttttacgagatggagtctcactctgtcgcccaggctggagtggagtggtgcaatctcggctcactgatacctctgcctcccaggttcacgctactctcctgcctcagcctcccaagtagctaggattacaggcatgtgccaccatgcccagctaattttggtatttttagtagagatggggtttcactatgttggccaggctggtcttcaactcctgaccttgtgattcacccacctcggcctcccaaagttttgggattacaggcgtgagccaccgtgcccagccgcaactcatttcttttttcttttctttttttcttttttttttgagacagagtttagctctttttgcccaggctggattgcaacggcgcgagcttggctcaccgcaacctccgcctcccggcttcaagcgattctcctgcctcagcctcccgagcagctgggattacaggtgcctgccaccacacccggctaattttttgtatttttagcagagacagagtttcaccatgttggccaggatggtctcgatctcttgacctcgtgatctgcccaccttggcctcccaaagtgctgggattacaggagtgagccacagcgcccggccaactcatttcttttctaacaaaaaacagcctgaaaaatcgagctgcagacatggataagcaagtgggaagcttccaggggtgaataccagcagctgtgtcaatggaaaagggccacctgagggcctggcatgttcaacatgggggctccagcttcccttttttttggtcactacgtgtacagtaaagaaacaggttttagtttggctgggcacggtggctcatgcctgaaatcccagcactttgggaggctgaggcaggtggatcacctgaggtcaggagttcgagaccagcctggccaacatggcgaaaccccgtctctactaaaaatacaaaaattagccaggcatggtggtgggcgcctataatctcagctactcaggaagctgaggcaggagaatcgcgggaacccaggaggtagaggttgcagtaagccaagatcgagccactgcactccaacctgggcgacaaaaaaaaatgaacaggcaacatggcgccagccagctagagaactcatctgcataataaaagattaagaagccaggcgcagtggttcatgcctgtaatcacagcactttgggaggatgaggcagcagatcatgaggtcagagtttgagaccagcctggccaagagaccagcctggccaacatagtgaaaccccatctctactaaaaaaattagccgggcatggttgcaggcacctgtaatcccagctactcaggaggttgaggcaggagaattgcttgaaccagggaggcagaggttgcagtgagctgagatcgcaccattgcactccacctgggagactcaaaaaaaaaaaaaaaaaaagaaagaaaagaaagaaaaaaaagattaggatgggaaggccagcttttcacaccctatgcaaattacacacatagccttaaccaggtttttacaccctatgcaaatgaaacacctggtccaaccaatcttttgtgccctatggaaatcagacaccacctccttaagctcatccataaaactcactgctttttactgaggaagtggaaacccgttcaagatccctctctctgcagcagagagagcgcttctctttctttcaccgattaaacttccactctgaacctcactctttgtatgtctgagtcctagttttccgggcctgtgagacaacaaatcttgggtatttaccccagacaacaacactactccagtgggagggaacacttgaagccaggagtttgaggccggcctgggcaacttattgagacaccatttctataaaacaaacaaacaataagcaggggctaggcatggtggctcacgcctgtaatcccagcactttgggaggctgtggcgggcagatcacctgaggtcaggagttcgagatcagcctggccaatatggtgaaaccctgtctctactaaaaacacaaaaattagccaggcatggtgtcaggtgcctgtagtcccagctacttgggaggctgaggcaggagaatcacttgaacccaggaggtggaggttgcagtaaactgagatcgcaccactgcactccagcctgggtgacagggcgagactccaactcaaaaaaaaaaaaaaaaaaaaaaagctgggcacggtggctcatgtctgtaatcccagcactttgagaggctgaggtgggtggatcacctgaggtcaggagtttgagaccagcctggccaacatggtgaaactccgtttctactaaaaatacaaaaattagccgggagtggtggcacacgcctgtaatcccagctactagggagggtgagacaggagaatcacttgaaaggagaatcacttgaacctgggaggcaaaggttgcagtgagccaagattgttccactgcactccagtcagcctgggtgacagagagagactctgtctcaaaaaacaaacaaacaaaacagtcagcaggaacaggctccagggagagacgttctgctgcctgggttgggagggctatgagaagttggcagaaggaggagcctagggaggttcctagatttttctgagtgcttgaggactctctctctgatttggggaggcttagggagcactgggcagctctgagagtggcctgggagcctggctgtgccccctgcaatcctgatgctttggggtaagcaggtgtttgccccaccaggccggagggcagagcagttcctctggaacatctcccaatgcacaaaggttctggatatgggtatgactgtgaacttcccctcggcaaatacctccccgacggaaatgcacacgcagccttctctcttggaataaggcaggaaaataaaaaaataaaaataaaaaataaatgtataagaaggtgaagtcacaacgggcagtagacagttggggatattgcaccatccctgcaggaaggaagcaccttggagctgacccaggccgcctcactctgcttccttttgaaacgctcgtgacttttcaaatactgcattttgctgacagggcaaagcatgctcagctggccatgacgacaggctctctggagacttggagaatgttccaggttgactcagaggaatgcaggttggaatccctgcttcatctctggttacctctgtgagcttgggcaaggatgggctttttatttttatttttattttattttatttattattattattttttaagacagagtcttgctctgtcaccaggcaggagtgcagtggcaggatctcgggtcttcgcaccctccacctcctgagttcaagtgattctccagcctcagcctcctgggtagctgggattaaaggcacctaccactacacctggctaatttttgtatttttagtagagatggggtttcaccgtgttgatcaggctggtctcgaactcctgaccttgtgatccgcctgccgtggcctcccaaagtgtgagccactgtgcccagtcccaggctttttaataaactcttctggagtaactgggtatctgtgtggcacaaaataaaccttgatccctacctcacaccctacacacaaaaattcacctttggggaaagccctttctcactctgagtctcttctgggccatggtttccaactcatagagctgctgtggtactgggtcccagcagccctgcctgaacacttcgcaaaaagtaactatcattggaggtgtgggggttcatgcctagaattccagtgctatgggaggatgaggcaggaggatcacttgaggccaggagttctagaccagcctgggcaacatatgcagacctcatctgtcatatatatatatatatatatattttttttttttttttttttgagacagagttttgttcgttcccccaggctggagtgcagtggtgcaatctcagctcactgcaacctctgcctcccaggttcaagcaattctcctgcctcagcctcccaagtagctggtgtgtaccaccatgcttgactatttttttgtatttttggtagagacggggttttaccatgttggccaggctagtctctaactcctgacctcaagtgatccacccaccttggcctcccaaagtgctggggttacaggtgtgaaccacagcgcctggcccccacctcttcatattgtcacatgggtcttaggcttccacatatgaattccaggaggacacatacatttgggccataggagagacaacacatcagactctcaggaaggactgaaggggtgggagtgggattctgtattcgatgggactctgcaaatttgaattgttcacatagtatacagtgattcccttttatcggaggtttcactttctttctttctttctttttttttttgagatggaggcttgctctgtctcccaggctggagtgcagtgctacgatctcggctcactgcaacctccacctcccaggttcaagtgattctcctgcctcagcctctggagtagctgggattacaggcacgcaccaccacacccagctaatttttgtatttttagtacagatgcagtctcgccatactggtcaggctggtcttgaactcatgacctcaggtgatccacctgcctgggcctcccaaagtgctgggattacaggcgtgagccaccgcacccggcctgaggtttcattttctgtggtgttggctaccttccatcaacctcaatccaaacatattaagtggaaaattccagaaataattcgtaagttttcagttgcctgccgttatgagtagtgtgatgaaatcagtccccaccccgccccctcccaccctggatatgaatcatccctttgttaagggtgcccacgccatagacactaccagccggctagtcacttagtaatcttctgggtgatcagatcaaccgtgtcagtattacagtgcttatgttccagaaatccaaattttattaattttctattttattatgttattgttgttaatcttttactgtgtctcactgataaattaaactttatcataggtatgtatgtatgcataggaaaaaaacagtgcatacacgtttggtattttctgaagtttcaggaatttactggcaatcttggaacatattccccacaggcaagggggaactattgtattattttggtattcaaaataaaagaggctgggcatggtggctcatgcctgtaatcccagcacttcgggaggccaaggcaggagcaatcgatcccttgagcccaggagttcgagaccagcctgggtaacatagtgacagcccgcctttacaaaaactttgaaaagtagccgggtgtggtagctcgtgcctgtagtatcagctactctggaggctgaggtagaattgtcttgggcccaggaggctgcagtgagttatgatcacgccactgcactccagcctgggggacagcatgagagcctgtctcaaaaaattaaaacaaaatagcacacagaaaaaagtttttgaaattagcctcaataacttgacagtttcatccatgtcagggatcaagcctgaactctggatgaatcacatatctatttttttttctttttttgggggagacagagtgagactgtctcccaggctggagtgcagtggcacgatctcggcttgctgcaacttgtctcttggcttcacgcaattctcatgcctcagcctcccaagtagctgggattacaggcatgcgccaccacgcctggctaatttttgtatttttagtagaaacggggtttcaccatgtcagccaaggctggtcttgagctcctgacctcagatgatctgcctgccttagcctcccaaagtgctgggattacaggcgtgagccaccgccccggccttgaactttaatttgtctcctgttctgacctgcctcaggtggagctctgctgggtgggtggggctgatagcctttcccgtcctacatgagttgtagatatgtgtgtgtgtgtgtatatatatgtgtgtgtttatgtgagtgtgtatgtgtgtgagagagatgaattctttttttctttttacttttttctgttttttttttctaggcggagttttgctctgttgcccagtctcaagtgcaatggagcgatcttggatcattgcaacctctgcctcccggattcaagtgattctcccacctcagcctcctgagtagctgggattacaggtgcctgccaccatgcctggttaatttttgtatttttagtagagatggggtttcaccatattggccaggctggtctcgaactgctgacctcaggtgacccgccctcctcggcttcccaaagtgctgggattacaggtgtgagccactgtgcctggccaagagatgtatgttgtatttttttttaagcagaggaaagaagtataaacattaaatttaaaaacaaaacttttggccaagcatggtggctcagtcctgtaatcccagcactttgggaggctgaggcaggtgggttacctgaagtcaggagttcaagaccagcctgccaacgtggagaaaccctgtctttactaaaaatacaaaaattagctgggcatgatggcgcatgcctgtaattctaggcacatgggaagctgaggcgggagaatcacttgaacccgggaagtggaggttgcagcgagccaaggttgcgccactgcactccagcctgggtgacaaaaggagactcttgtctccaaaaaaaaaattttttttaaattgtttattttttagagacaggggtcttactatgttgtccatgctgttaaactctcgggctcaagcgatactctccccttagcctcccgagtacctgagattacggggcgtttgccaccacaccgggctaattttttatacttttaatagagacaggatttcaccatgttggccagagtggtcttgaactcctgacctcaagtgatccacctgcctcggcctcctaaagtgctggaattacaggtgtgagccaccatgcctggccgtttattattatttattattatttttttgagacgtagtttcactcttgtcacccaggctggagtgcaatggcgcgatcttggctcactacaacctttgcctcacaagttcaagcaattctccttcctcagcctcccatgtacctaggattacaggcacacgccaccacgcctggctaattttttttcacgccatgttgacggggtttcaccatgttggccaggctggtttcaaactcctgacctcgagtgatctgcctgtgttggcctcccaaagtgctgggattacaggcgtgagccacggtgcccggccgagaggtataatttctgtttattttttctctctgcttatcttgttggctgtttcttctccaatacagtcacatttcttggataagaacaaaaatataataagaccgttttgaaaatgcaggcaaagaaatgctggaaagcggtcatgaacatgccaacggagattatctctgcgagctgagcgattaagggaggggttgcagggtttttatttgttttcttttctgcttctttgtttctccatcaggaaattgaccaacatttttttaattaggggaaatgacagttaccccgtgtgcactttttggcaggacctggccttcagcgtgggtcttggggccccctggccagtctgagctcctgtggggcagtttttctggtcatctgcagaggccccgggtgcaggcaggggagccccagctcctacgcgctgcatttcctcagaggctccagcaccacgaatttttttttttttttttttttttagacaggaaatttctctgtcacccaggctggagtgcaatgacacaatcatagctcactacagcctcgactcccagggctcaagtgatcctcagctacctcagcctcctgagtagctggggccacaagcatgtaccaacacccatggctaaattttgtattttgtgtagagacaggggtctcaccatgttgcccaggctggtcttggactcctgggctcaagtgatccgcccactttggcctcccaaattgctggggttacaggtgttagccaccacacccaaccgagggcttcattctctctgacgctctgtgaatagagtttagactgtcctcccaccagcactggggtgaggtaatgcaggaaagggctggtcccactggcccagaagcagataagagcaccctccatctacagccaaaagttaaaatccaaaatccagaaccttcctgagccaccctttctgtctttggtgctggcacggcactggcatgcagtgggtgccatattattgctctccagcggcatggcaggtcttaccactgtggcatcaggaccccgggtttctctagctcgggtgatgtggatcacttgagaggccgaggatcgcttgagcccagaaggctgagcctgcagtgagccctgatggcaccattacactctagcctgggcaacaaattgagaatctgtcgcaaaataaaagaaaaaaagagagagagagagagagagtttctcttatttgcagtcttgagtaaggcgtcctgcaggaatttttgtttgtttgtttctgttttgagatggagtttcgctcttgttgcccaggctggagtgcaatggcgtgatctcggctcaccgcaacctctgcctcccaggttcaagtgattctcctgcctcagcctccctagtagctgggattacaggcatgtgctaccatgctcggctaattttgtatttttagtagagatggggtttctctgtgttggtcaggttggtctcgaactcctgacctcaggtgatccgcccgcctcagcctcccaaagtgctgggattacaggcatgagccaccacacccggccatttattttattttattttattttatttttttgagatggagtttcactcctgctgcccaggctggagtgcaatggcgtgatctcggctcactacaacctctgcctcccgggttcaagcgattctcctgcctcagcctcctcactagctgggattacaggcgcctgccaccatgccaggctaattttttttttttttttgagatggagtcttgctctgttgcccaggctgtagtgcagtggcacgatctcagctcactgcaagctccacctcccaggttcaggccattctcctgcctcagcctcccaagtagctgggactacaggcgcccaccagcgcctgtatttttagtagagacggggtttcaccgtgttagccaggattgtctcgatctcctgacctcgtgatctgcctgccttggcctcccaaagtgctgggattacaggtgtgagccaccatgtccggcctaatttttgtatttttagtagagatggggttttaccatgttggccaggctggttttgaactcctgacctcaggtgatccacttgtcttggcctcccagcctgctgggattacaggcgtgagccactgcgcccagccaatttttgtatttttagtagagatgggggtttcaccatgttggccaggttggtctcaaactcctgaccacaagtgatccgcccacttcagccttctaaagtgcttggattataggtgtgagccaccacacctgacctggagaatatatctttttcttttttttttttttttagatagagtcttgctctgtcacccaggctggagtgctatggcacaatcttggctcactgcaacctctgactccctggttcaagtgattctcctgcctcagcctcccgagtacctgggattacaggcatgtgccaccacagcacagctaatttttgtatttttagtagagacagggtttcaccatgttggccaggatggtctcgatctgctcacctcgtgatccgcccacctcggcctcccaaagtgctgggattacaggcgtgagccaccgcgcctggccgaatatttctcataccaggaaaagttggaagcagcccacagatctagcctgagaggcctggttaaattagtgtctggccgggtgtggtagctcatgcctgtaatcccagcactttgggaggccaaggtgggaggattgcttgagcctaggagtttgagaccagcctgggtgacatagggagcccccatctctacaaagaataaaaattcaaaaattagccaggcatgtggcatgaacccatgttcatgcctatggtcacagctacttggaaagctgaggtaggaggattggttgggcccaggaggttgaggttgcaatgagccatgattgcaccactgcactccagcctgggtgacagagcaaagccttgtctgaaaaaaaaaaaaaaaaaaaaaaaaagatttgtgtctgcatgacacaccatgatgtggacagggaagggatggaaaggacaccatgcatgcagataggagaccacatacactgcagcaactccacttctgtgaatgtatccgacagaaatgggaccttcattccgctgggtgcggtggctcacacctgtaatcccagcattttgggaggccgaggcgggcagatcacttgaggtcaggagtttgagaatagcctggccaacatggcgaaaccccatctctactaaaaatacaaaaaattatccgggcgtggtggcacatgcctgtaatcccagatactcgggaggctgaggcaggagaactgcttgaacttcggaggtggaggttgcaatgagccaagattgcgccactgcactccagcctgggcaacagaggaagactccgtcaaaaaaaaaaaatgccctgttgcagtggctcacacttgtaattccagcactttgggaggtcaaggcaggcagatcacctgaggtcgggagttcgagaccagcctgaccaatgtgaagaaaccccatctctactaaaaatacaaaaattagccaggcgtggtggtgcatgcctgtagtccgagctacttgggaggctgaggcaggagaatcgcttgaacccgggaggtggaggttgtggtgagccgagatcgtgccactgcactccagcctggtgacacagcaagactccatctcaagaaaaaaaaaaaaaaaaaaaaaagaacattctcaagaggaaataaattatccgtgacagggctcaatggttctccttcattcatgtgaggtttttaatgctttttcatatgccttgggggagagttgtcaaatcttaacaaatcagagaagaattataactcgtagaagaatgtcaaaggcatttggagggtggaagctgcagaaattgagccccatctgcaaatgggatggacagatgaaagatgtacattctcaagtctgcgtaggaacgtatattaagccgagcatggtggctcacgcatgtaatcccagcactttgggaggccaaggcgggtggatcacctgaggtcagaagtttgagaccagcctggccaaaatggcgaaacccgtctctactaaatacacaaaaatcagccgggcatggtggcacgtgcctgtggtcccagctactcagaacgttgaggcaggagaatcgcttgaacctgggaggcagtggttgcagtgagccgagatcgcgcccttgcactccagtctgggtgacagagtgagactccgtctaaaaaaaaaaaaaaaaaattgatccattccatcttgcatttttttaataaagtttttttttaattaaaaaacattttttttttggtggagattggtgtcttactatgttgcccaggctgatcttgaactcctggactcaagtaatcctcccacctcagcctcccaaagtgctgggattacaggctgagccactgcacccggccttgcagatgtggttaacacctccaatcaactgacctgaagtaaaggaatttatcctccatgaccttgatgtttcttttttttttttttgaaaccaagtttcgctctttttgcccaggctggagtgcaatggcgtgatctcggctaactgcaacctccacctcccgggttcaagacattctcctgcctcagcctcctgagtagctgggattacaggcatgcaccaccatgcctggataatttttgcatttttagtagagacggggtttctccacgttggtcaggctggtctgaaactcctgacctcaggtgatcctcctgcctcggcctcccaaagtgttggggttacaggcgtgagccactgcacccagccgatgcttcttatctaatcagttgaagtccttcagagagcaaaaacagcttctagagggaaaaaggaattcgtaagcttgcaacaaataaagcctccctgtttccaacctgctagagtgccctatgaattttgggtttatcagcccccacgattgcatgacccaattccttaaaatacatcttttttttttttgagagagataggatctctgccacccaggctgaagtgcggtggtgggatcatggctcactgcagcctcgacctcctgggctcaaacgatccacccacctcagcctctggagtggctgggatcacaggcacacaccaccatgcccaaactttttaaaaacttttttgtaaacatgggatcttaaactcctgggctcaagcaatctttccatgtcagcctcccaaagtgctaggattccaggcgtaaaccaccacgcccagacaaaataaatcttaaaaaattttttttttttttagagaaaatctctttctatatatgtaatatgtatatttcctgttggttctgtttctcttgtgagccattactgatacaggcacccagaggcccggtgatgggaaggaggcggggttactttccaatacatactcagggaatttcttttttttctttttttgagatggagtttcgctctgtcgcccaagctggagtgcagtgtatggtcttggctcactgcaagctctgtctcctgggctcaagcgattctcctgcctcagcctctggagtagctgggattacaggtgcccgccaccatgcctggctaattttcgtatttttagtggagacagggttttaccatattggcgaagctggtcttgaactcctggtctcaagtgatctgcctgcctcagcctcccaaagtgctgggattacaggcgtgagttaccgcgcccggccactcagggaatttctgagatagtgacagcttccggtggcaggacctcagctgattgccttggcctttgtccgctgaacccaggccagcttcctagcctcgggcgccacccaagacacctgcagaccaaggacacacattagaggccttgggtttcacggtcctgggcagggccaggcctgaggtgctgaccaagcctgctaccctcaaccaaaataaacctagggcaggatgctgcttgatcagccatccatagaacaccacagcccgagccgggtcacagatctgctttggctggcctgcggacagggaggtcctcagccgcaaaaggcctgagaggtggacacattggatttgaagaccaaaaatggcccccttctggttgggtgcagtggctcacacctgtaatcccagcactttgggaggctgaagtgggcggatcacttgaggttgggaatttgagaccagcctggccaacatggtgaaacctcgttctctactaaaaatacaaaaattagccgggcttggtggcatgtgccttgtagtcccagttactcggaaggctgaggcagaagagtcacttgaggctgcagttgcagtgagccgagatcgcaccactgcacttcagtctgggtgacagagcaagactttgtctcaaaaaaaaaaaaaaaaaaggcccccttcggagatgtgggagttgggggtgggggcagatttcaaagcctgggggattcgatctgtcatctgtgcaacccagctgactatgtggctaaagtttaacaagtttcacaataaccattagacattgactgacactgccagggaagtgctccagagatggggaaacccacgtccacacaaacacctgtccacgcgtgtccacagcagctctagtcatggttggcagaaagtggaaacctccccatgcccatcagctggtgcatggataacagagtgtgttccatccacacagggggatatgatacagccatggaaaagaaggaagcactgatccatgctacagcgtgaatgaacccccaaaacacgatgctgagtgagagaagccagacacaaaaggccacacagtgtgagattccattgatctgaaatgcccagaacaggcaaatccatagacaggaagcagattggtggttgccagggactggtggaggggaatggggagtgactgctgatggagacaggtttctttttgaggtgataacaatgagcctgggtggctgggagtggtggctcacgcctgtaatccctgcactttgggaggctgaaggggacagatcacttgaagtcaggagttcaagaccagcctaggcaacatggcgaaaccccatctctgctaaaaatgcaaaaattatctgggcttggtggcatgcgcgcatagtcccagctactcgggaggctgaggcaggaggatcacttgaacccgggaggtggaggttgcagtgagccgagatggcaccactgcactccagcctgggcaaaagagtaagaccctgtctcaaaaacaaacaaacaaacaatttattatcattattataatttaagatggcatctcaagcgacagaatgggccttcgtctcaaaaaaaaaagagcctgagcaacataacaagaccccgtctctgcaaaaatataaataaaattagccaggcgtgctggatacacctgcggtcctagctattcaggaggctgaggtgggatcgtttgagcccaggaggtcgaggctgcaatgaactatcattgcaccaatgcattccagcctgagcgatagagtgagatcccacctaaaccgcatttattgagtatccactgtgtgccaggcactgagctgggtgctagaacagagcccagagtgggagaaacagctataaacagacgatcatagtgccaggggaatgcttcttttttttctttttctttttttttttttctgttttttttgagatggagtcttgctctgtcacccaggctggagtgcagtggcatgacctcggctccccgcaacctccacctctcaagttcaagtgattctcctgcctcagcatcctgagtagctgggatgacaggcgcgcgccaccacgcctggcaaatttttttttttttttttttttgagacggagtctcactgtatcgcccaggccggagtgcagtggtgtgatcttggctcactgcaagctctgcctcccaggttcatgccattctcctgcctcaacctcctgcgtagctgggactacaggcacctgccaccatgcccggctaattttttgtatttttagtagagatggggtttcaccatgttagccaggatggtcttgatctcctgacctcgtgatctgcccacctcggcctcccaaagtgctgggattacagaagtgagacaccgcgcctggccatttctgtatttttagtagagacagggtttcaccatgttggtcaggctggtctcaaactcctgacctcgtgatccgcccaccttggcctcccaaagtgctggtattacaggcgtgagccaccgtgcccagcctggatgtttctcttatagcacagagaggggagagatgtagcattttatgaacctttgaagaatggaggagggggtgtgggtgttgggttttgggggatgaatatgagtttgccaagttgaaggtgggggctgaccatgaactgaactttatggaatctaaccaacacaacaaaataaatctaattttcaaaatgaaaatgaaaatgagcatattctcctttgttggcgtgaactgcaggaatgtttatatgtggacacttcacaggccagcctgcaccaggcctggctcatgccggccagttccttcctgaagctattcatgtctgctgcaaagatgggattaaaaacagcatgttggcctcttcattcattaggagagtggagaaatgggaaaatttgggctgcccaaactcctcatgatctatgaggataaacagaaagttcaacgccagccctgactgaggaccccccacaaggacttatcttctatgtttttcttttctttttttgagatggagtctaggtctgttgctcagactggagtgcagtggcatgatctcagctcactgcaacctccacctcctgggttcaagtgattctcctgcctcagcctcctgagtagctgggattacaggcttgtgccaccactcctggataatttttgtattttagagatagggtttcgccacgttggccaggctggtctcgaactcctgacctcaagcaatccgcccgcctcggcctctcaaagtgctaggattacgggcgtgacccaccacgcccagcctccttgctctctgaatctggatctcactttctgtaaatccaatgtgacctttggctgtttactgagtacaagacgctcctgatgacccattttacagatgaggaaattggggctcagagaaggcgagagagcagagactgggattcagtgaggagggtcccagggggcctgatgatgatgatgattattattattatggagacttgctctttttgcccaggctagagcgcaggggcgtgatgtcggctcactgcaacctctgcctccagggttcaagtgattctcctgcttcagcctcctgagtagctgggattacaggtgtgtgccagcatgcccagttaatttttgggtaaagacagtgtttcaccatgttggccaggctggtcttaaactcctgacctcaaatgatccacctgcctcggcctcccaaagtgctgggattacaggcatgagccacccgcacccagccaggcctgaatttttttaaagacagggtcttcctatgttgtccaggctgaagtgcagtggcacaatcatggctcgctgcagctttgagctcctgggctttagtgatcctctcacctcagcttctcaagtagctggaactacaaggaatgggctaccacacctggctagatttttaaattttttatagagactgggtctccctatgttgcccaggctgttctccaactcctgggctgaagtgatcctcccactttggcctcccaaaatgctgggattacaggtgtgagccactgcacctgattgatggtgagtttgaagtggaaggtgtttgaaggggtgaaagtgtccatcagaaagcagctggccaggcgtggtggctcatgcctgtaatctcaatcccagcactttgagaggctgaggtgggcggatcacctgaggtcgggagttcaagaccagactgatcaacatggagaaaccccatctctactaaaaacacaaaattagctgggcatggtggcgcatgtctgtaatcccagctactcaggaggctgaggcaggagaatcgcttgaacccgggatgcggaggttgtggtgagccgagatcacgccatggcactccagcctgggcaacaagagcaaaactctgtctcaaaagaaaagaaagcagctgagaccaatatagctaaggagtgaagagctgggttccgattctgattctgcccacttgcaggggctcttcctagtccttctgtgaacagcatcttgttgtgcttggggtctttcccccttcttagccaatgaagccctagctatcagtgtattgtagccctctggccactgtgattggttcagagacaggcatatgccccgggctggggcaataatagacaatcttggtgtctgtgccacccctatcagacaacagagctcttgtgatgttgcttaaatgggtaaggctaggctccgagttgctggccaccatcttgcctgcctgtaaacaaaggacagcaaagccaagaaatagagagagaggctggtggttttggttgagtgccttgatccagctgatcctgaaggtgtcctttccaattccatccaccaattaattccctttttggctttatgcagcccaaagagttcccatgtattcagcccttagtgctgcagagacagcactataaacatgtcagttacttcattcattaggagagcagagaaattggaaaattgaggctgccctcattgctgtctatgaggataaacagaaagtcaaagaccaggcaggctgtagtggctcctgcctgtaatcttagcactttaggaggctgaaataagcggatcactcaagcccaacagtttgtgaccagcctgggcaacatagtggaccctgtctctacaaaaagaaaaaaaaaaaaaaaattagccaggcatggtggtgcatgcctgtagtcccagctacttgggaggctgaaatgggaggatcacctgagctcagggaggttgaggctgcagtgccaccgcactccagcctgggtgacagaatgagactctgtctcaaaaaaaaaaaaacaaaaaaaaaaaacagctaaagaccagccctaagaactgaactttctggaaatggcttggacgtcccacctgcctgccccagagagttgttaaccaacgtctctgggcctcagtttcctcgtctgtaaagggagctgtggttgcctaaggtgaaaggagcacaggtgccaagcgttctttgccatgcctggcgctataagatatccagtgctatctagggatgccccccgggtgcccaccctggactcctgcttacttggacttggataaaagaaggttttctggccaggtgcagtggttcatgcctgtaatcccaacactttgggaggcagaggcggatggatcatctgaggtcaggagttcaagaccagcctgagcaacatggtgaaaccccatctctactaaaaatacaaaaattagccaggtatggtggtgcctgcctgtagtcctagctacttgggaggctgaggcaaaataattgcttgaaactgggaggtgggggttacagggggttgcagtgagcccagattgagctgctgtactccaccagcctgggcaacagagtgagactctgtctcaaaaaaaaaaaaaaaaaaaaaaaaaaaaaaaaaagaagaagaagaagaagaaggttttctgcgttctgagggacttagttgctcccagacatctctgcctcttgcaacaacctgccaagaacgtggagagccagaaaggagagggtgaacatctctggactgaaacagggaaactgtcaaaggctctagagtaggcaggtgggacgtccaagccagaaaggacaggtttgctctgggttccttgcaagtgacctccatggggttcggggctgagacggagcctacaacgttgtctaaggccacatttcagacaactgccagagaatggttgttttaccaaatagctggccagcacacggggtctatgtctctgtgtcttttggctaggttattcacaccccaccctcgtcagctgtcagggttaccctggggaatgtcaattccaggcacttctggttccagtgggcattcaggcaaagggtgctccagcagcccagggtagccctgataccctgcacaggtgcctgccattaaatggggctggaaccgaggggtatagatggaacagttcagaattgctttcattcctgccctgcccttccagactgctcttttaaaaggtgtaaatcaggccaggcatggtgatacatgcctgtagtcccagctactcaggaggctaaggctggaggatcatttcagcccaggaggtcaaggctgcagagagctatgatcatgccactgtactccagcctgggctacagagtgagatgccgtcttaaaaataataatgataatgatgataaattttttgtttgtttttgagacagagtcttactctgtcactcaggctggagtgcagtgacgccatcccggctcgctgcaacctccactttccgggttcaagtgatcttctcgcctcagcctcccgagtagctggaactatgtgtgtgtaccaccatgcctggctaatttttgtatttttagtacaaacggaattttgccgtcttgcccaggctggtctcaaactcctgacctcaagcgatccgtctgccttggcctcccaaagtgctgggattacaagcatgagccaccgcaccatgacaaaagcccctctctactaaaaaatacaaaaattagctgggcatggtggcgcgtgcccatagtcccggctactcaggaggctgaggtgggaggattgcgtgaatcttggaggtggaggttgcagtaagccgagatggcaccactacactccagcctgggcgacagagtaagaccctgtctcaaaacgaaaaccaacaaataaaaatgtgtggtgaatgaatgaatgaatgaatgagtgaacagacaagatgtaaaaagccgatcagagcctctgccaaggagatgtcagagggtttttcacagcagcctttgaacaatggccctgggaggaagccaggcttatttccccatttgacacaggaagaaactgtcttggttcaaatctgatccttttttctcctaagaccacagctgcctccgaaacaaaggccgacaattgctgccagcaagtgctttgctgtttttacttcctctaaacattcttcagtggattttcctttcaaactggttgtaaggaggcacatggctgggtgttggtggggggtggcacccctgcccggaccccacacgcttccctaccacgtggccggtttggagtagacccatctttgtgctgaaacacagcccaacattgccatatacggggggcttgtctacattttacaagatttttacaaaaatgatgctacactttgcaaatggatttattttttttgagacaaggtcatactctgtcacccaggctggagtgcagtggtacaatcacagctcactgcagccttgacctcccgggctcaagtgatccttcctcctcagcctcccaagtaggtgggactacaggcatgtgccaccatgcccggctagggtttcttttttttttaatagagatggggtcttgttacgttgcccaggctggccttgaattcctggcctcaagcagtgctctttcctctccctcctaaagtgctgggattgcaggtgtgagccaccacgcccagcttggaacatctttattttaagatgagcatgctggggcctcagggagtgaagtgaattttccaaagtcactcgttgtgaccaggacactggagtcaaggccctttcatcatgtcatggggtctaggtaaggactcaggaaacttcatttatttatttatagatagagttttgcttttgtagcccaggctggagtacagtggtgcgatctcggctcactgcaacccccgcctcctggattcacgcgattctcctgcttcggcctccggaatagctgggattacaggcatgcaccaccacacccagctaatttttgcatttttagtagagacgaggtttcaccatgttggccaggctggtctcgaactcctgacctcaggtgatctgcctgcctcggcctcccaaagtgctgggattacaggcgtgagccaccacgcctggcctttgttttaaggaggaggagtcagccaatgggatgcctcaaggactgggtccactgacacagaacaatggaaacagatcagcgatgtctgagttcacagcatgcgggtgctgctcctaagaacccttctgtagatgctactgttctccccatttgcaaatgaggaagctgacactcagagatgtggatcacccgccccaggttacacagcacagagaggacatgttaggactgaggattcaaattcttaaggtttgctttcctcctggcaaaagcaagtcatgaaggcgtggaagctgaaatctcgaggctaacgctccccttttcacacctggccacaagctgcaagaactgggagttggtgctcccatgagtccaacctgaggattcgctggagaaaaattcagccaagaaaagctcagctcgtgaggtccccctcctgggctgtgaaggaagcggatagtgccagtcattacagagccgcaattcctgagtgttaaagttctcagggccatgagtatggacttcgtgggaaatagaagcaccgtgtagacctatgcatgtgtgtatgtctgtgtgcatacgtgtgcatgtctctgtgtatgtatgtgcatgtgtgcacgcattcgcacatggcgttgcacagggtgtgtccatgtgtacgcaagtgtgtgtatatagggagcttctaaatcagatgaaaccaactggaaatccggatactgatgtttagaattcaagctctggagtcagactgccccaggcctcagtttttccattgggaaatgggctgatcctccccggatgagagcactggagtccagagaggccaatgacgatcagatttatctcagtatatggtctgtgctgtgggccttgaggctgaaattttgtgagctcctttaattctcttttttgtgtgtgttgggggttggcggcagggtcttgctctgtcgtccaggctgggctgcagtggtgcattcatagctcactgcagcctccagctccctggctcaagcaatccttcaacctcagcctcccgaggagctgggactacaggtgggactatcatgccctgctaacaaaaacgtttctttttgtagaggtggagcctccctatgttgcctaggctgcagccccagcattcattaatcatccccggctcctacctctgcccagcccttaatcccccgaacatatgatggggattaatcccccaaacccttgggggggattaatcccccaaacatatggggatggggggacttgtgacaacttaccactctttccctggatagctcctctatggaatgtggtagagtttgggggccacccaaccctcaggctggccagggaggggtgggcaaggggagctgagaagggcttggggatcctcacgagggaaaactgaggcccaagcgggtgggatgtgaaaggatcagtcggtaacaagaccagtccctctgaaccctctaagagaggtcctgggtaaccgtatgtatttaaccctgcaagctgttggctacatttcactggagaaaatgcaggcgtggagggtcccaccgcttgaccacctcggggaggactgactgtgagcagagggtcagtaatagcgtccctgttgctggcacatctctggccctcaaaacaccaccctccaccatgggtgggcattggggtagtatgtggacacaggggagatagaggcctggctgggcccctcagggaacacggtgaccccaaaccaccacaggctcctgcactgttgaggtggggctggtgacagggtgggggtgacagggacagagttgagggacctggaggaggtagagagagtcagcagtcaggtccatatcccaagaggtcagggtttggggggtgaagctggcattggagcccagcctaagggccagtgcctgccagagacacctgcaggaaccacagcccccactgtcccggagaggcagggaaactagggaattgggacatcagcagggtcaccccaaagttagatggcacatgaactgtgtggagggaggcagcaaggtgaggagaccctcaggaggaccctttgttctcatatgctatttcctggactttgtccacaaagaagcccattctaggatgtagggcccaaacccaaatggctaggcgtggagaacctgttagctaaatgacaagccatcatacatacatgtgtatatgtaagtttatttcaggtttgtatttttagatatagggttgcccaggctggagtactgtgatgcaatctcaattcaccacagcctccaatcctgggctcaagtgatcctcccacctcagcctctccagtagctgggattacaagcacaggctgccacacatggcttcagaattttttttttttttttttgagaccaagggtcgctcttgttgcccaggctggagtgcagtggcgcgatctcggctaaacgcaacctctgcctccagggttcaagcgattctcctgcctcagcctcccgagtagctgggatgacaggcatgcgccaccatgcctggctaacttttgtatttttagtatagatgaggtttctccatgttggtcaggctggtcttgaactcccaacctcaggtgatctgcccacctccacctcccaaagtgctgggattacaggcgtgagccaccgcgcccagcctcagaaattttttaagtgaaaaaaagcagggagcagaatagaacttgaagtataatttgcattttaaaggttccatctaaaacacgattgtgcctacgattgtttacatgtggaatatcctctgaagccaacccaatacctgctcttttcccacgggccatggagactgctgagacagcctgtggggagaggaaggcagtctccgagtggcacccttggagtgtcctgtcatttgttttgacttatgggaggagaaagcctctgtgctccattccgcatacatctgggtttggtttttcatcttttacaaggaaaacgtcctcgcgtgctgcttgaacatgcatgcgcgcacatctgtacgtgggcatgcatgcacagcaaaggcctggactgaagccacaccttgcttttgctactggggcttcttggcagcgccttctgcctgtcttgccccaaggaagctccagggaggagaaaggccatgacagggatcttgtggttccacttagtcctaaattattaggttggtggaaaagtaattgaaggttttgccattacttttgcaccaacctagtacaaggcagcaggggagattttaccttccaaatgagatccttcccagtctgtagaggggaaactgaggcctgagatcaagtgacctgcctgggtcaacgccaggacaggcatcctgggctggacaccactcctcctgtcctcctaagacaccctgaccggccttagggtgatattaagaggaactaggggaagaagggttccactactgaagagaaattcctggtggttcctcaccccctgcaggtgagccccacattttccctgcaggctccggcctttctcagggagtgccactgaagctagcggttagacatcgctaagatgaaggcagggtgagggtcttggctggcaatagcttcccccgggacacggtagaagtgaggctgggggtcctgcctcagcttcctaagggctctgtctcaaggctcccgctaagctgcccacagggacctttctacatgagcatcacctgccctgggcacagtgccttccccctccctgcagtctggctcctcccctcctcaccctggtcaggcagaggcccctgcaggccccctgggtgctgccttggtctctgctgtgccctctgcacgcccctcctcacctggagggccaaggggctgttgacagaggaaccatgggcaggctggcagcacccagggacagcagggagtgtgaagatgacagagaggcagctctgcagtcagagggtggcccaggcaggctctggttttactctggcagctggaaccccagccctgggatgatggggcaaagccctgtggggacaggtgagtcgtaggcagcaggggcacagctcccactgccctgacacccctcaaaggcagcttctgtacttggcggtaccgattaccctccccagcctccccagaagggaattgccctccctctggtgggtgcttggtcccttcctgctctctggcatcttccaagctttcctggtgacagtgacacaaggtccctcaggtggggcaagccagtgaggaggggcccgagggaggagcaccacgccggcggagggcacgtcctgggaggcagccatcatctggttctacactgcactcccatctgcgtgcgctggtgtctgatctgattttaaaaacacagccatggagaccccagcacactgcatttcctctacatttattgcaacggctaaatgattaacaacattcacaacttcttagatcttaaaaaacagaaacaaaagaaaacttccattttgtaacatcacaaatgtcttctaggctttatcaaggaccaaaaacactacaattctctaagtgatttccagtgatggaaacaagccagagacagtaaagcacccagagtggcgagagagcacttccagatgcctgttgtcctctcgggggtgaccctggaactagaacgacagaaaagacactgtgactttgacacggctgtgccaccacacatcacgcgcgacacgaggatcctgcagagcggcctctgcagagagcaaggacagcctcggttaagagggaggggctgggggcacggagggccagtggcatctcctctatcccggctggccggcagctggcagcacgcaccatgctctgctggctcccgacaccttcactgccccagcgctgaatccacaggagaggtgtcctctgagagtgtagggggctttctaggttcaaggagatgtgccctttgacccctgccaaggactcacagaaccatctcagctcaaacttggaggagcggcaggaggtggggggcggtcagtggccacacgccacagattcctaaagcatttaactttttaataaaatgaagtggagaaagtcaagaatgaacatgctaggacaaagcacatggaatggtcagggcgatgctggagagagtgcgcttgatccacgctgcaggtgtgtgcgcctcgctcgggtcaatgggctgagccccgcttggagctccatccattcacctgacccatggccaacatggaagctgtcggaggggtcaggaaaggagaaggagaaaggagaagatgaaccccccgcacctgtgactccccaaaaccagctccactccaggcccccacaggctggttcgttcgagggttgggttataaacccaaactccatcctccatgctggcacctctactgccataaagatctgccagttgccaaagctacagaagccactggaagcaagcagagcccctgggggtggtggcactgcaaggtgacagggaccaggcagacaaggagctgggaccacagcctaggaagtctgtggcttaaagaaagccaggatttccttttttttttttgagacagagtctcgctctgttgccaggctggagtgcggtggcacaatctcggctcactgcaacctccgcctcccgggttcaagtgattctcctgcctcagcctcctgagtagctgggactacaagcgcccgccaccacgcccagctaattttttgcatttttagtagagacagggtttcaccatgttggccaggatggtctcgatctcttgacctcgtgatccacctgcctcggcctcccaaagtgctggaattataggcgtgagtcaccgtgccggccttttttttttttttttttggagatggagtcttgctctgtcgcccaggctggagtggagtggcatgatctcagctcactgcaacctctgcctccccggttcaagtgattctcctgcctcagcctcctgagtagctgggattacaggtgcccgctaccacgcctggctaatttttttgtatttttagtagagacggggttacaccatgttggccaggctggtctcaaactcctgacctcaggtgatccatccgcctcaacctcctaaagtgctgggattacaggcttgagccactgtgcctggcccaaagccaggatttctttacagccaatacaagtggcatttcccgctcagttctgtggctgatgccctagccactgctgtgtcccctaatcctggggtgtcagagggatcctaagttttccagatttttgcccatacttaaaacttcaacgatcctgcttcacaaggaaggatgagtggagaattgagtggagttacacgcagcagagtgctggggaatctggagagcgggggcgatcacatgcctggaaatagagcagctgcagagcccaccccaggaggagcctgcctctccttacaaaggctgtaataagacagcacttgacgatgccatacgtgcgaaaagtgcagagtctcagagggtttacaacccccatccctttgtaactgtagtttgcttacactgtggattctaaagagacatgtaaatctggggccgatttcatctgtttaatgattactccccacccgatagagctattctatactgttgctaaaatttcattaagtctctcaagatgcattgatgagatgagacaccatgaataacacattcatcaactcaagtatggcaactgttcagagagcttcagagctttggtacccgagtgcagacttggtaattaccgggaatttgtctcccccgtataaattctggcgaacaacgagaaaacaccatctgtgatcgtttccacatcacgtttgctaacagagcacttctggagagcaatggccagtccaactggaaaatcagccagaggagctggttcctcagcactcacaggctgaggtgcctttcgggggcagcgccaccttctgaaggggaaccaagacagatttggaggggacttgctgctaaaagcatgtgaacagagaggagaggcaaaagcacattgaaaatggtgcatgtttttttctttgagagaaagaaaagccagcgaaacctccgccccagagactgcagagacgtttgttttcatgtacacaccaaaccgtacttgggcactggctccaggccgatccagggcagggatgatgttttaagggcaattgctgcttcaaggcttatctttcacatcagtggttttgatctattcaggaagagaacgattttgttcaaaactgaggtggaaattaggtgagggggcaactaaaaaaaaaaaagaatagaaagatgaggatatttacaggcccaaggccctgcagaaggaaaaggatttgaagaccctcacaaagggacacagccaactgccatcctctgtggcagtggctgtcacagtcgcccttccacttgcatgatggcaaggccctctggactaggaacagtccgtttgctggtcatgttatgtggtaggtggctgtcatctgtgagagaaaacttgagcaagagaagagacaggcgtggcctatttccacacgcacatccacggaggctggcctggaggccttgaggggctcacagccggggcaccaggcaggccatgcgcatctgcccttggccagtgtgaggtttgctccttcagcaaacctggaaggtaagaatggggcatatccacatccatagacccttttgtttccctcacagaattttgtgattttttttgtgtgtggcatttttgggggagcagggaacatcaactttgttgggggaaatttctctgcataccagcacgccagcgagggcagacggccttacacactggcctgtgaacatacctatttgttggcccgcttgtgtctgtacatctgcatcatcctctgtcggaacacatcgaatgtgtcttctttgtgctcctgcccgtcagcacccaacccttccccttccgagggggttcccctagggagtgaaaaagagagtcagttgtgcacctgagcccagggcctggcatgccaggaactgggcatgggcacaaacagtccatgagatgcaggtgtttgggacacacactgagacatcaaagaaagggaaaatcaagacgcgactcacagtagaaacaaggagtactcaccctcgaagagctggcttttgagggggtgcccagagggccctggttacctcggaatgccttacccagcaggaactaagctcagtattaaatgaaatgcctgctggaggttatgatcggggtttaataaactttgggcctgtgttcgggaccctggctggcccggctatgggttcccgggaatgggaaagcagttccagacggaaactacacagaaataccacttagcttttatgatggtcacaaatgtggccaaaatgaccagggccaacaagctggttaaaaaatctacaccaggacagaaaggagccctgtaaacacctgcacatgtaaatgatcagcttctcatctgaagatgccttctgtttaaaaaacaaaaatcaactgccagctgtaagccatcttggctgtgaaggagccaagcggcaggctgcaggtggaaggactgaggccccacccactcccaccccaggctgcctgctgcgtacacgctgaccggctccctgatgccctttccgagggagcccaggccatggccctccttccagcccatcttctgcagcatctggaagcccaggttcttatcggtcagcttctgctgggcgaagtccaagtccttgggtttctgaggagagaggagagtccaggcatgtgggccacagggagatgcctggatcaagggtctgtcctaggctatgcctggagcccctcacccccaaatgccctcctgactccccagatgctcaggctcaagctccagtcacttccccagttctctgcaacatccctgggtgggatggaacttctaagtcagaggtcactggcctgaggtcagtcgtgcctctcagctaccactataaccctggtgccaagactgtgaggaaaactgggtaagggaatggccagtcccggggtcaaggagtcagtaggaaggccctcagcggaaccctggataaagaagggtggccctgtgatgaccacagggcgcagcccagggaagagtggggggcaccagggcacaggcctgcaggcaggatgggggccagacagtgggtgagaactggctggcagcaccctccctgaaccaccccaacatacccctccccgagtgcttcattcactccctggctgcattgtctgtctgtcctcaggactgagttctacttggacattggggtctgtgtctagcacagagcagacctcactgagagctagtacagctgttgattgctcctgtgggtggtggggaagtgcagcaatctctgggccactagatggagatctggagacagacagggccctggggcctctggaggaggagcctgcagggctgtagcagaaggaatttctattcactcatgaatattcatgacacactgctgtgtgacagagcccagctgggcagtccaagaccttgccatgtattccttggctcttcacgagtcaacttgtgtgggtgggctgggcgtggtggctcatgcctgtaatctcagcagtttgggaggccgaggtgggtggatcactggaggtcaggagttccagaccagcctggccaacgtggcaaaaccccgtctctactaaaatacaaaaattagccaggcatggtggcaggcacctgtaatcccagctacttgtgaggcggaggcatgagaatcgcctgaacctgggaggcagaggttgcagtgagcggagaccgtgccactgcattccagcctgggcaacacaatgagactgtctaaaaaaagaaacaaaatacaaaacttgtgtgtgttttttttaaatatagagtcttgctatgttgcccaggctggtctcggattcccggctttaagtgatcctcccacctcagtctccccattaactggaactataggtatgtgccactgcacccagcttttgatgtttttttttttttaagacggagtcttgctctgttgcccaggctggagtgcagtgatgcaatctcaactcattgtaacctccgcctcctgggttcaagcgattctcctgcttcagcctcccgagtagctgagattacaggcgtgtgccaccacgcccacctatttttgtatttttagtagagacggggtttcgccatgttaaccatgctggtcttgatcaaactcctgacctcagctgatctgcccgcctcagcctcacaaagtgctgggattacaggcatgagccactgcgcctggctgatgtatttatttaaggcatttactgaacgacctggggaggctgtgagggttcatgtgctcttgagagggagggaggaaggtgctgaggaggatcacgggggctggtgctgggggtctgagcaggggacaggtgggagtggctgggagagggttagatgaccctgggcatgggaagcagggtgagaagggcatgctgagtgctgtgagctcaggtctttgggcagtcagccctcatcagcttagcaacctgccccatgatgtcatgcaggcctcacgaggtataattcaaccaaaagacaaatcccccccttgccatctgcattgaggtgcccaggaatcagcttccctaacgttaggggtgcatgtgggaggcactccagagacaaaggagcttggagacaaggcacaaaaggctgagcctgggggagccaggggctgggagaggaaagggagaagggagagagcagggcctcaggtcaggagggagggagggaggagagagcaagtgctcccataaggaaggcctgggcctctggagctcctggggcctcagtgttctcaccctagaaagggacaaaacaacctggagaggtgctgagaactcaacatgcagcaagatgtagggggtcagaaacggataccctaaggctgggcgcggtggctcacgcctgtagtcccagcactttgggaggccaaggtgcgtggatcacgatgtcaggagtttgagaccagcctgaccaacatggtgaatccccatctctactaaaaatacaaaaattagccaggtgtggtggcacgcccctgtaatcccagctactctggaggctgaggcaggagaatcccttgaacctgggaggcagaggttgcagtgagttgagatcatgccattgcactccagccttggcgacaaagggagactccgtctcaaaaaaaaaaaaaaaaaaaaagaaagaaagaaagaaagcgataccccgaattatagcactttgacaggtgggactaaagtagcagcctcaaggtccctcccaaagcacaggaggaagctgttttcttcaagttccctatctacctagaaactggacttgccaaagaagaacacaagggccttggatcccttccctgaaatgtcattaaccagagttgaaaactcctatcacacaagaagagatggaacattaaacaccacacctagagcccagaccactggctgttctctagtcccattcaattctcaatgaggatcattcacaagatgatgcctgcctccattcatctctcctaaaatcatctgcttcccctctaaagttacctacagcctcccatctgccctctcccctacaaagaggtatttcagcttcaaccacctggcccttctttgagttttcataatgttttatatggctcctgtgcttatgcacgtgaataaatatgtataacttttttgtttcaagacaggatcttgctctgtcacccaggctggagtgcagtggctccatcatggctcactgcagtcttgaactcccgggctcaagtgatccccctgccttggccttccaaagtcccgggattacaggtgtaagccaccgcacacctttttttatcctgttaatcttcttattgtcagttcatttcaacaggcttagacttggaccttcaaaggcggagggaaattccctttgttctcttcagaggcatctccgagggtattatataaagtagctgtgtgtgtgtatgcatgtgtgtgtgcgtgtgtgtatgcatgtgtgtgtgcatatgcgtgcacatgtgtgtatcttgtgtgtgtgcgtgagttactggatgcaggcggcccctccataatggcatgaggtggtcttggtgaggcggtgtgggcagaagtgtctctgcagggcagttaaggaggggaggtatgaagggaggagctatgctatgggctgggacaggaagaggggcacaaacagtgaagagacacccctgcaaaccaggggacaccagacaggacctgctacactggggggccccttgccatgagaaagtggcctggagaaaagaggtgacagaacccaccggctgagatgagaaacggggcatccgtcaggcccttctgggagctgtgcacgacctgggccctgggatgacgggtagggaaggaaggggaaaggctggtcatggcagggcacaggggtccccagagggcaggtctgtactcttttccctttcaggaaggctgcttggaggtgcagtgggaggaagagggtttggctcagcctggaagtttcttcgtgaatgttcaaatctgtgtttaacaatcatgatggtggtttcctggacagctggaggaaagccaagccctgtgggcgaggtggaggtttgcagaggaaagctgcagccaccacggcctcccttccacccacagtcactggcagacaggaggacaggtgcagagccccaaggagacagcagcatgtgcaggacacccaccaggaaccgcgttcagtttaatcctcactgtacctcctacctgctgggtaagtgtggccatcccattttacagacaaatccgtggctcaggggttacacgccaaggttacaaaactactcggtggcagggctgagctagagtacagctgtgcctgacaccaaggtcctgctgtgccctcatctggccgtgcccttatccaggccacaccaaggggcaccagatgccagctcagcctaaaacctggcacatcagtaaggactatgagctctggactcgggaaggtccctccttcctgccataattggggtcagactgacctaggtcactcggaaggggttggaagcaacatggcactgcctgacaccagcagagcgatctcgcctggctccccgccctcctccctgaccatgaaggactggtgaagtctctccacatgtgtcccaggtgaccctgcttgcccccagcactgtgtcccccaggccatctggagtgtacctgccccctttccataacctggctccaggtcagtgaatggcagttctgtccctcttctgcccaagctgacaaccctggggtcatctggactcctggcttttgcacacccagcccacaagcaggtgtcacccactccatcttctccccttctcattgctcctcatgccctggtccaactgtcttaagtttgagcctcctcctggttcccgcccacaggctgctctccaccctagtggccacatccaccacaggtcccagaggtaccctcccttccctgagaaagggccacagcgttaacatctgttgaggtcctgtgtgaccaccccccggattcctctgctgccacaaaggcctcttgctgccccagcctctctaccgaggctgtgcccttctcagatctctacactgtttctcctcagctcctccaggcttgtgccaacgtcatctgcaagagagacctcccttggctttcccaattcagcggcatcccctcgaccccaccttattctccctctctttgacctgcttctctttgcccacagcatccccaggactgcctcatccatttctctttcactgttggccctgcttgctgctgcctccaggtggacagtcgggacctggcacgtaggaggtgctgaccgcacacaccacgctctgcttactagcagattagtgaactctcttcaccacccttccagtctactaagcttgtaagtttttatgttttattttttaaggagaccaggaggagacataggtctcactatgttgcccaggctggcctcaaactcctgggctcaagtgatccccctgtcttggcctcccaaagcactgggattacaggcgtgaatcagtgcacctggataacttgaactttttttttttttttgagacaggctctcagtctgtcgcccaagctggggtgcagtggtgcaatcagctcactgcagccacgacctctcaggcccaaatgatccttccacctcagcctccagagtagctgggactacaggcatgcaccaccatgcccaactaatttttgtattttttgcagagacagggttttgcctattgcccaggctggtcttaaactcttggactcaagcgatctgcccactttggcctcctaaactgctgggatcacaagtgtaagacacccaatcggccttagcttgaacttcttttttttttttttttgagacggagtctcactctgtcgcccaggctggagtgcagtggcgcgatctcggctcactgcaagctctgcctcccagattcatgccattctcctgcctcagcctcctgagtggctgggactacaggcgcctgccaccatgcccggctaattttttgtatttttagtagagacggggtttcatcgtgttagccaggatggtctcgatctcctgaccttgtgatccacccgccctctgcctcccaaagtgctgggattacaggcgtgagccaccacacctggcctagcttgaacttcttaagggccaagacattatctcgtttatctctcaaatcccactgcatccattacagggatctcaactatccattacacagatgaatcactagtctatgctttggacaaaggcaaaacagttttcaaaagccctcccaagagaaaagtctctgttgtgttttacacattaatacctcagtttgaaatgttagcacagcttaatcacaagctgcagcatcctttggaactccaacaaattctaaccaactatactttgagtgaggactaccaatgattacgctcaccttctttttggacatgggacgaccccgaggcctgtcataggcaattcgaactggttcatggactagaagacaaaagaaagagacacatacacatacatgtgcttttcctaaattacttagagactgaagatcttgcagtctattttggctaacagttctctgatgacagaaggtgtcttaggctctgcatggcagctgctgagccccagctcctctcaagaatgaacatgtatgacccctggagtgagcagagacgggacacgctcagggtaggcagcttgggccataatgaagggttcactgagcggtgccttgcttttggaaagtctattcaaacctaagagtccccacatttataacaaaagatccaatacatggattattttccatgactacagaaatatattttgcttcaacaaaatatttgtgatactgtgccctcctagtttatctgcagctaattcactgggaaataattaaagtctggccaggcgcagtggctcatgcctgtaatcccatcactttgggaggccgagatgggcggatcacccgaggttaggagttcgagaccagcctggccagcatggcgaaaccccgtctctactaaaagtacaaaaactagccaggcgtggtggcgggagcctgcaatcccagctattcaggaggctgaggcaggagaataacttgaacccgggaggcagaggttgtagtgagccgagattgtgccactgcactccagcctgggcgacaagaacaagagtccatctcaaaaaaaaaaaaagaattaaagtctgcctaaaactttctagtgaaaaacaaccatgcttctcatatagagaaccacatcatatcattttattctattttttatgaaagggagattagcaagtctgtttttttttttttttttttttttttgagacacagtttcgctcttgttgcccaggctggagtgcagtggtgtgatctcagctcactgcaaccttcacctcccaggttcaagcgattctccagcctcagcctcccgagtagctgggatttcaggaatgcgtcaccacgcctcgctaattctgtatttttagtagagatgggatatctccatgttggtcaggctggtctcaaactcccgaccaaaggcgatcctcccgccttggcctcccagagtgctgggattacaggtgtgagccagcacacccggcgcaggtctggtttttatctcatcaactacccaaagaactgagagcttctaatgcagaaataaaaaactccacctccccccaagaagagcatacataacaagcactctgatacactacctgccatccgtgacaagtttaattatttacttcattttttttacattaatttttttttcttgtaaagattaggtctggccatcttgcccaggctggtctcaagctcccgggctcaagcgatcctcttgcctcagtcccgctaagctgggattacaggcacgagccactgcgcctggccccatgagaagttttgaaggatggtaaaggttatagtagaatggttagcatttcactgcaacaccaaatttttcaaacacaaaacatgaggactattccaaagcaggaaaaaccataaggccactgtcacatgtaaatgtgactgtctgaatgatgtagaacacacaggtgactgtttaacacagtcccacaatggggcaccattcactacaacttcacacataggttttgcagcagaagtcccatgtgaaagcacggtccaggcctgactgtggggagacagcttggagggcattgggggcacaggagtcatctgggccacggcgtgcccatcaaaaggccacatgcgatgcaattctatgtactgacagactaggaaagatagaatacctggggcttggaaaacagtcagtggttgctgaatcgggcaggggactgcaatgggacaagagacccgttctgggaacaggcttcagctctgctgtactggtgggttctcgcctctgcacagtcaacaaaattcaaatggtccacttgaaaagggtgcgtttcactgctggtaaattatacctcaagaacccggaacctccccacaggagagcaggagatggcctctcatggccgaggcaggtcccactgaccactgcctgggaccacccctgctctgttcccatctcactgtcatgacatgaagcagcttatcagcaccctgggccttccaggggctcagaagggcccccagctgacaaagtcacaggcaggaaaacagctgagatgacccaggcccatcccctccacagttggggatgccccgacctgaatccaggcaatcagggaaatgtccagcagcaagtagagtgccagaagccacagggtagcaaggaaacatgtccttagagcaatgccttcagaccactgggaaacatgagtgtcggctcacattttggagtggtgcacaaaactcttttggattaaaatgtctccacctgtctcttctaactctcacagcccaccaaccaagaactgtgctagaggcaactgtgccgacaggcgggcactcaccttttggctcctggatgagacacactctcttgggagctggaatcatgccaaccttcaatgacttgctgctgatcctcttccgagggaagcaggtacctgaggaggcctgtgacaaggcaggtgctccagccaggtcgtcctcggcagcctcgccgggaaggccgtcggcaggggtgctgccctcagacttgcccgcccctccaggagcgggggcctcctctcccccatcctcatcgtcctcgtcctcctcctcaggcatcacctctgggctctccagctcagcctcccgcggagggggctcgtcttcaaactctgcttccccttccatgaggtccacggggctctcctgagaacccgtggtgtcaccaccaccagtgtgaaggttgtgcggagatgacgtgaaacaaattgatggacatagttcaaacactttctttcgatagaatttgaaagcagaactattttggtcatgtagaaacctggggcacagaggaaatacattgggtaaccagatggaatctctcaacatttttatttgctgaaactgctgggattgatccaaggaaggtggaggtgggacaagggaaagaataacctgaccagtctctacgcggctatggcttgatggtgcagcctctcaatgatagaaaatttgaggagtactagtaacttaataaggagctagaattcaagaagcctaactgctttccaggggacagaggcggacgaacaaggtatgcagggcttgggaaaatgctggaatagagatctggcttgagacccatctcaccctttctggttacatcactggcctctctgggcctccatgtgcccattttgactctggttcctcccaggtatgagaagcatggagcgatgccaggaggagctgcacagttactgctggaacatgtgcaccatggaaccgtaaggtgccccccgaggaggctcctcacccctagcacttcccgctctggggcctgcagtccacctacatgggcgtggagatgaggcctctctgtgcctcaggggtctggtggccacctcgacttgtaaccacagctatgaagctgtggctggtatgagaaacttgaaacactcccgaaagcaccaaagtccacttggaccaaaggaaaaatggccctcgtaaggcaactcaacctcataaatgtgccaagtccccccagttagcatattaatatatcccaataaaatcccattctgaatcagggcaagatggttctaaagttcataaagaaaaataatatgtaagagtatctgggaaaactctgaacaagactcataaggggttccagccccaccaagcactataaaatgccccaaagcctctagagttaaacagcatagtagtccataaggcagaccaaaggaacagaatagaaagaccagaaacccagcatttgattaaggtaacctctcaaactactacaaaaaaggggtgggtctttcaaagaatggtattggaaaagctggacggctttataattattattacacatttttagagatggggtctcactctgtcgtccaggctagagtgcagtggtgtgatcacagctcactgcagcctcaaactcctgggctcaagaaatcttcctacatcagccacccaagtagttaggaccacaggcaaatgccactataccaggctaacaaacacacacacacacacacacacacacacacacacacacacacacacaccacacacacacaccacacacacatacaactaaatatcagcagaaacaaatgaatctgggccgggcatggtggctcatgcctcccagcacattttgggaggctgaggcaggcagatcacctgaggtcaggaatccaagactagcctggccaacatggtgaaaccccgtctctactaaaaatacaaaaattagctgggtgacacctgtaatcccagctacttgggaatctgaggcaggagaatcgcttgaacccgagaggcggaggttgcagtgagctgagatcacaccactgcactccagcttgggcgacagagtgaaattccgtctcaaaaataaataaataaataaaacggattgtatgacaactttataacataaccacacccacaaaatgaattaactcaataagcttgagcacattagaattaaattttttctaaaggcaaaagaaacacaaagtcatcttggcccatttacaagcatggctggatagcgtccaacaccttgcccagtattgtggtcaggatccagggctctccttccagggaaggacaggacagagtactctgaaggacactgctcagaaaaggctgtcacagatggggaggaatcacccaaaacccaacaagtactacagcccaagtacccaggctaatgcaaaattctcctttaaactgtacttttcattgaaaaaaaagaaagtgaaaaagaaaaaaggactcatgggatgcccccagctgccctgcactgagctgtcctccttatccaaccctgccagaggaaatcccacatacacagtggacaggtccgaccccgaggtctacagggcccagcagctccccaaggccactactgcctgtaaaaggcaaaacctgactgtaagcctggtcaggcttcccgtctgtaggtggtcagtgccccacaaggcaggtggtaccttagtgcaggacccagtcataagccaaggctgcggaggggagtagggcttggcttgtgcaatcaggtcccaagcaagttgaaagagtatgttctgtcaccactgaatcccataaatgctctgagaaatgcacgttttcaactgtaattttaactggatgaaggcatgactgtccaacaagctaggaccagcacgaggagttgagagccccctcagtagggttctggctcagtaatgggaagatgggtgcctcctaccggcagcctttctctggaggggacatctcatgtcaccccggggaaaaaccccaggggcagtgctggctcctcacccaggttttcttgcctatgggctgtgtgcttttgagctgagctccacctatccaaggaatggagagggcaaaggtacctgctcccagcatgagcacgccaccttatccctgtgtagaagtgcctgctgtcagacctgggcaagggctgactatcactactatcatgcagtgagcagcaaatcctcacctctctcccctcccctggccaactcctatttagcctttggatgcagattaaatgtccctctggggaggtttttcctgatgcccgagatgaaggcaggtcccctagaacagattttttttttttgagatggagtttcactcttgttgcccaggctggagtgcaatggcgcgatctcggctcactgcaacctccgcctcccaggttcaagcaattctcctgcctcagcctcccccgagtagctgggattacaggcacctgccactacacccggctaattttttttatttttagtatagagacggggtttcactatgttggcaaggctggtctcaaatgcctgacctcatgatccacccgcctcagcctcccaaagtgcggggattacaagcatgagccattgcacctagcctttttttttttttttttttttggagatgaagtctcgctctgttgcccaggctggaatgcagtggctcaatctcagctcactgaaacctccgcctcccgggtttaagcgattctcatgcctcagcctcccaagcagctgggattacaggtgcttgccaccatgcccggctaatttttgtatttttgtagagatggggttttagcatggtggccaggctggtctcgaactcctgaactcgggtgattagaacagatctttctcccttaggcccctggctcagctgaagtgaagtcatgacttactcctggtataacccccatagtaggaatgcattggccaggctgtgggctggctcaggacatgcttgtggcgtgaacacactcaaatctaaagggtgtaatggccagttgcagtggagcacacctgtggtcccagctactctggaggctgaaacaggaggatcacttgagcccaggaattcaaatccagcctaagcaacatccttagactttgtctctctgagaaagaaaaaggtgtgatgagacccgggggggtacgtaccacaggtcagggttatcggtgctgttttctatgctgaattgttcgatctctggtcccacctgagcaacaaatctagccagtttctctgcagtctccattgtcttcatgtcaactacaaaacataaagcacctgtcaggcatgactcctgagctgctgctccccgtgtaaacactgcagggttgtggaggctgattataaagatggcctgcatgtcccctccctgtagccttgcccttcgtcacatgtggaccctttgtcaccaagaagtgaactctgtgtatccccaccttgaatcagggctggtcctgggactcacatcagctatagaatgtggtggaaaagcccattgccagttccaagcctgggccttggaggacttgagtacttccactgtctctcctgaagccccaaccccaattgccaggtgaacaaacatgggctggctgctggggggatgacaggcatgtggcccagccacaccatcatctcagctgacagcctggacacctgccactgaccgcagacatgtgtgggctagctcagcagatgacccagccactggcaaattcacaataccggacgcctcctggttggtttgtttggtttttttttgagatggagtcttgctctgtcgcccaggctggagtgcagtggtgagatcttggctcaatgcaacctccgcctcccgggttcaagcgattctcctagctcagcctcccgagtagctgggactacaggcatgtgccaccacgcccagctaattttttgtatttttagtagagatcgggtttcaccatgttgcccaggctggttgcgaactcctgagctcaggcaatccacccgccttggcctcccaaagtgctgggattacaagtgtgagccaccacgcccagctgatgcctcctgttttaagccacagtttggaacggctcacgacacagcaacacctaaataatgcagcagttgtggacacttttttgctctctccttcccacttagtgcttaggaagcactggccagagagcaggcctgtggtacagagagaaagaaacagctaaggtgacagaagaaacagaaggggtgaagttagtcgattcggaggaagcagtgcaggtcagcgaaccccaagaacaggaactgtggagaccctggggatgaggaggcgcaatgagaacaaggcagtcccgaagactatcaagggaggccaggatatagcaggacatgggatcccaagttcaggcaatgcaccgcccacggccccagcagcaggaccctgtcggggagcacgaaggcatggggcagcacctcataccagctccgctctcagaagaggaggagggagctgcaggactcgcatgcagctctctcaagaaagcaagagagaaagcgccaacatgtacacttgtcctggccaggtccctagagcttttatccactgccttgcctagattgcaggcccccccaattctaaagagaccctggagatgggagagtagggactggggcccagaggagggggacaggagtgagcacccactgtcagcagatgggcagggagaagaggtctgaggtgcttcagagatgtccactcctgctggcttgggggatgggcctgaggcttctaagctggggtcctgaggagaaggtccaactgggtctggcgggcagtccttggcagcatcatttctgtctggcagggatggttttgcctgtgagaggcctggagcctgccggccgtggtgtttcagcctggtgcctgaggataggagggtctgggtcccggtggtcgctctcctcgccttccagccccggagcccttgagcacggaggagcccccgccgctgccacggaaggagtttcttcttgaggttgcggacagcccgggagtacagcatggccctcactgcacagtctgctgaggtcggcttctggtcggctcctcgcaagttctcgctcatccgctgcatttctgccaacttcagcttgtaatatttatactccagactattttcatcagacaaaaacctagataacaaaacaagcataacgggacatttatgaaaacaccaccaggtcccaaattgttccttcaaacacaaaccctttctaagtggccaactcctcactgtcctctcctgtctcagaggctctgcctggctctactgaggacccagagctaggcccaagacagctgccctgctaagagtgaccacagggcaatcgggagtttgaactgagttcctccttgatttccatcagcagcagccgtgagggagctcccagctcttgatggcctggaaacacaaaccagtcaccttggagccatagcaccctggcaggcagaattgacaccttttaaatggcccagccaggatgagtgctcggtgagcttttgactgcatcaaggaaagtgtgatgtgaaccacaagagaacattaaccaaggagcctgcggcccaggtgtgaaatcttatgacccagtcatcatgatgagaacagtaaagagaaggttgagctacatgtactaacagaaaaatattcagctgggcgtggtggctcacacctgtaatcccagcactttgagaggctgaggcgggaggattgcttgagcccaggagttcaagaccagcctgggcaacaaaacaagatcccatttccacaaaataaaaaaattagccagggtggtggtgcatgcctatagtcccagctactctggaggctaaggtgggaggatcacttgagcccaggaagtcgagaggctgtggtgagctgtgattgcaccactgcactccagtctgggcaacagagcaagaccctatctttaaaaaaaaaaaaaaccttctccttctagtgtctttacttttttcatcattttccttctagcttcatgagttgattacagctcaccgcagcctcgaccttctgggttcaggtgatcctcccacctcagcctccccagtagctgggactacaggcgcgcaccaccacgcctggctaatttttgtgtttttggttgagaggacatttcaccatgttgcctaggctgatctcaaactcttgggctcaaggtagccatacgcctcagcctctcaaagtgctgggattacaggtgtgagccactgcacctggcccactatttctaataaagtcacctgaagtcactctttctcttaagtatttttatgactgcatctggtatataatgttcttcttgccacttccttctaaattgcttctaatttcagctatgattacccttcactcaaaagttattcagaaacatgttttattttggttgttgctggtttctagtttgctgtattggcataatgtggcccacgtgaatttcctgggtgtgctgtgattttctctgtgatttcatacataacgaacttttaagatgggcgtggtggctcacgcctgtaatcccagcactttgggaggcggaagcaggtgggtcgcttgagcccaggagttcaagaccagtctgggcaacatggcgaaaccccatctctttaaaaataaataaataaataaccaccccacaacaaacataacagacttttgtgaatatttgatttcagtttgtgttaaagaagaatattgcttagtaagtatggcagtatttcaggtggctttcagattgtttgatattaagtagcgacatatcagttattagatgaggttccagattaccagtgacaagccaactagaagtaaggtggctgtgtgttgcacagcattggcagcactgtgtgatgtggcatgtccctggcaggcagctccatacacaagctcctgctgacactgttagccagttgaggtctgtctggacctgacaaaacgactgagtaccggctccactgctgccctggcactctgttgggctaacggtggcatcctgcaagatcatgccctaataagcaatagcgctcaattaagagaatgctgaccaacatgggcactctggttctcaagtcaaacacagccccagcaaggcaactcctcatcaagggcagagcgcagaatcagggccaggtgacctgactgccccagtcactcatggctctgatggctttccttgttcctggatggttctgatgccaagtgcagtccgaggatgtcagtcccaaatgcatctcccaagttccagtggaacataacatcaagaacagagaacactcaacaagccagtctgctggcttcaaatctcagcatagccacttattagctgggaacctttctgtgcctcagtttctccatctgtaagacagggaagatgataagcagtagctacttcatcatacagctgtgaggcctgcgttataagcttttcactaggaggcaagtgctatgaaaactgcctagtagtcattaaccgctcaacaaatattagcagattgtctctgtttatgctcatttcctgtgttataaaatcttccacaaccttatttggattacgtcgtctacgcatttcagagaaacattaatgtctcctaccatggttttggattcatccaattcctcttatcatggttttggacttaaatgatttttttttttttgagacggagtctcgctctgtcacccaggctggagtgcagtggcgcaatctcggatcactgcaacctctgcctcctggattcaagtgattctccagcctcatcctcccgagtagctgggattataggcacccgccaccacacccagctaattttcgaattttttttagcagagatggggtttcaccatgttggccaggctggtcttgaactcctgatctcaggtgatctgctcaccttggcctcccaaagtgctgggattacaggcatgagccaccgcacccagctctggacttaaatgatttctaaaggttgtttatttacatggctcaaagctatgtagtgcaggcaccaagattcacaatctatatgttcgtgatgactttcccttttatcaggaacttcttttgctccttttagtgctgttctccttaaagtcttttttgcctaaacaattctctacatcctttctttttggtagcgttcacctgctatgcaatttcccatctctgtgttttccaattcctgtgtttttgcttctttctctctatagtagtacggaagttatagacctcacttctgttcctttaatggctaatcgacacacatacctaaacttttattttgtatcaatatccagaattaccctttagctctatcctcatgtcaaacaagacaaaggcctgcacacctacctccctccttccccttgtgcctcacatatttagatcatctgggattttagtttcttttatttcaccccaaacatcaattatttagattttatgttaactttggggtgcttggacaatcctgctgaggctagaccacagggattcttagccacttgttttcctgagtgtgtgaacacgtaggacctggtgggctctccctggagagcatggtcagggctggcccactcccaggggacaatttagaagatgagagaaaacaaagtatgacatattccttcagctttatatcctgcactgttgttatcattttctaggcttgatgctttgcactctctcatagaaaaggacggaagcctgccccttggtgttccaaacaaggaagtaaagccatagtggatgtgtctgtctatacttctgattgattcattgattgatttgagacggtgttttgctcttgtcgcccaggctggagtgcagtggtgcgatctcagctcactgcaacctctgcctcctgggttcaagtgattctcctgcctcagcctcctgagtagctgggagtataggcagccaccaccatgcccagctaattttttatttttagtagagatggggtttcatcatgttggccaggctggtctcaaattcctgacctcatgcggcccactcgcctcggcttcccaaagtggtgggattacaggtgtgagtaaccgcacctggctcttctgacatctttagtgcacgacacgaggcaggtcacctcggcaaagaggcaatggccagttctgtccacaaggctccagtgggaacaaatcatgcttgtggggtgtgagggtggaaggtctcaaatctctgctggccctcagagggtggagataagaagcccttcttatatctgcctcctagaggtctgactttttcacttgctaactaataaaaagaatttattaaggctggacatgatggctcatgcctgtaaccccagtgatctgggggatcgcttgagcccaggagttagacaccagcctgggcaacagagcaaaaacccatttcttaaaaaaagaaaaaaaaaaaaaagctgatagctgaatgcggtggtgtactcctgtagtctcagctacttgggaggctgaggcagggggattttgtgagcccaggttgaggctgcagtgaactatgatcatgccactgtgctctagcctgggcaacagaatgaaaactcatctctttaaacaaaaaaaaaaaagaacttattaatccacatatatcttcagagaatgtcaatggtcatgcataaaactgttcagtcaagaaaaagcaacataggcttattaagagatacagaggtaagccaggtgcggtggctcatgcctgtaattccagcgctttgggaggccaaggcaggaggatcatgaggtcaggagattgagaccatcctggctaacatggtgaaatcccgtctctactaaaaatacaaaaaaattagccgggtgtggtggcaggtgcctgtagtcccagctactagggaggctgaggcaggagaatggtgtgaacccgggaggcagagcttgcagcgagccaagatcccgccactgcactccagcctgggggacagagcgagactctgtctcaaaaaataaataaataaataaataaataaataaataataaaaagagatacagaggtagccgtgagaagtagtttgaagaactaagtgactgccttcaaggagtggaacatggaaacaggtcacagcagaaacatttggcttttcattatgcgttcaattgactgttttgttaaatacaacatacaaggagcattttgacttaagaattcaaacatgcacaccagaaacctaagtttagcagtttctttacttattgctgtgcttttgtatcacactctttcctcttacagtctcttggtaattccttctcttttttttgagacagagtcatgctccgttgtacccaggctggagtgcagtggtgcgatcttggctcactgcaacctctgcctcccgggttcaagtgattcttgtgcctcggtctcccaagtagctgggattacaggcgcctgtcaccatgcccagctaattttttgtatttttattagagacacggtttcactatgttggccaggctggtctcgaactcccaacctcaagtcatctgtccccctcggtctcccaaagtgttgggattacaggcgtgagccactgcacccagccaggtaattccttgtgaaggagtttttggatgataaagtctctgggaccaactcctaaatctttccttcttcaggatctattctatcagccaaccgctgagatttttatttcaatctatttttcatttccaagatccttaatagaatcgttttcatagcaaccagtgtctgtttcatggatacaatatactcttattacctgagactattcattgcacatacatatttatagactacacctcctctttctcatagtgactctgtcttctagggtgtcaggagttggttgagtttggtgatgctctttcatgatactggtttacctcaaatatcagttcttagtttgatgcttatttctgggactacaggcacccgccaccaggcccggctaatttttttttgtatttttagtagagacagggtttcaccgtgttcgccaggatggtctcgatctcctgatctcgtgatccacccaccttataggtgtgagccaccatgcccggccgcttatttctgattttgtaccctgccctgccccctatccaaacatacccctgactctggcttccgtctgctgcccctggttatcagtggtcatgagaccactgggccatgtgcaggggtcatggggcagaggcaccagcccccaggcctctcagggcctcctattcctccagcctaatcaccttatcaaccacctgtaaagtgcccctgggccttctaagtctggatgccttcttaccaagagggtcggtatctgcttgcatctgtcaatctgacaatccttcaacatgcacactggttcagaccacagaccctggatttgaatctcaactctgcctcttactagttgtggatcctcaaggcaagagggctcttggagcctcaaagtttcttgtctgtaaaataagcatagcaagagacctgcctcccaacgttgtttatgaggattcaaccagctagtgcttaaatcagtaatgtgcttagaacagtaccaactgcacagaaggcacaagtgtttattaaataaaaagtattcaataaatgatgctgggacaattaggttatttgggaatttttaacttttaagttacatgcctacctcattcaatacatgaaaataatccaaactcaagaattttgtaaaaataaaaccacaataagctccaaccttccccttggtaaatcatggtgggtaggaccaaagacatggaaatgtatgcctttcaagcatctttagtaattacaacagcaagcatagcaagtccagtatgggtacaatctgactaccaaaaagggcacactcaggaggtcaaggctgcagtgggctgtgatagcacccctgcattgcagcctgggcaacagagtgagatcctgtcactaacaaaaaacagaaaacaaaagagggcacagcacacctacagagtagcagtgagaaagtcaattagtacagataacctatggagagtaatctaatgataaacatcaatggtctccatcaggggcagctctgcctgccatgggacaccaggcagtgtctggatgtattctgggttgttactagtgagacagaaggtcctactaacatcaaacggatagaggccacagatgctgctaaacagcctgcaatgtccaggacagctccaaccctaatacagaatgatccagcctcagtgctgcagctgaggctgggcgcggtggctcacgcctgtaatcccagcactttgggaggccaaggcaggcggatcgcatgatttcaggagttcaagaccaccctgggcaacatggtaaaaccccgtctctactaaaatacaaaaaattagctgggtgtggtggcgggcacctgtaatcccagttacttgggaggctgaggcacaagaattgcttgaacctgggaaacagaggttgtagtgagccgagatcacaccactatactccagcctggcgacagagcaagattccgttaacaaataataataataaaaataaaaagtgctgcagctgagaaactgacataaatcaaaagcctctaacatgagctttaacccagcagtttcacgcccagatatcataataaactgccagaaaggtaggcagaaatacaatcaaagcactgatcatcactttttttttttttttttaagagaaatggtgtctcagcccagcacagtggcttacgcctgtaatcccagcactttgggaggccaaggcaggtgggtcacctgaggtcaggagttcgagaccaacctggccaacatggtgaaaccccatctctactaaaaatacacagatttgagaccttccaccctcacaccccacaagcattatttgttgccactggagccctgtggacagaactggccattgcctctttgctgaggtgacctgcctcatgtcgtgcacctgtaatcccagctacttgggaggctgaggcacgagaatcgcttgaactcaggagacggaggttgcagtaagccaagattgcgccactgtactccagcctgggtgacagagcaagactctttctctggcttgttctttactttctctaataagaaagtactatatttaggacgcaaactgtaattttaataagttgttcggccgggcgcggtggctcacgcctgtaatcccagcactttgggaggctgaggcaggtggatcatgaggtcaggagatcgagaccatcctggctaacactatgaaaccccatctctactaaaaacacaaaaaattagccaggcgtggtggtgggctcctgtagtcccagctactcgggaggctgaggcaggacaaaggcatgaacccgggaggcggaggttgcggtgagccgagatagcgccactgcactccagcctgggcgacagagcaaggctccgtctcaaaaaaaaaaaaaaaaaaaaaagttgttctatttacataaagaggcaattaagcaaaagacagtttaacaaatattagcaataaattgcaaacaactgcaatgatgtattactaatcttactacccttactctgtattctctgcatgcacatctcactgcatccttaaaacagcccagcagggacttggagctgtagtcacaggtgagagaaggccacccacccagctggcctaccactggtctgcagcagagctggggcttgctgaacccacataaatctgagccaccctcatgctcttctcactggagaacaccacttgctcaagtatctcaccctctgctctcaataccatcagagtgacccaaattttgccatatactccatgagagggattcacagcgtggacatttaaagacctaccagtaagcagggtcctctttgagaagagttctctctttgggagacaggctgccttcgatgacacgtttcacaagctggtcgatggtgcccactaccctgtgatctgctcgctgggggacagctggaacacacagaacagcttctctgagaaatatgctgaatgtgggctctgagaagacgaggatagttgagtagttgggggcttagtgctgaacccaagcaggcatcaacaaccgaaatcctcattcacaagacaccagcattgaaaagaggaaaacaaccaatatggaaaatctcctcctaaaaaatgtaacagtataaccactaggagagaaacagtcacagctttcaatgactggacagagcaatttatgtatatgctctagaaaaagaaagatatatagcaatttgatatcatttttcacatattacttaataatttgagtgttcataacattaaagtggaaaatataaatatctagtataaaatatacaaaaatgtatctaggttatggttctcaatataaaggtgggaataaaaaatataaatatggatacatagaaagaagactataaggaaatatgttaggaaatatgttaacagaggttatagggggtagaattatcaggaatttcattttccttatgctttaagaacttaaaaaaaaaacttgtgttttgtaatcagaaaatatatgtatcaattcacaaaaaattttctccaattaaaaaaaaaaaagaaaaaaaaaaaaggtcagccgggcacggtggctcacacctgtaatcctagcactttgggaggctgagcggggtggattgcctgagctcaggagttcaagaccacactgggcaacatggtgaaactccgtctctgctaaaatacaaaaaaaaaaaaaaaaaaaaaaattagccaggcatggtgggatagagcgagactccatcacaaaaaaaaataaataaataaataaataaaaaggtcagtgatcccaaattacatgttcacagaaaatatctgctgaatgtataagaaacaaattttggccaggcacagtggctcacgcctgtaatcccagcactttggaaggccaaggcaggcggatcacgaggtcaggagatcgagaccagcctggctaacacgatgaaactccatttctactaaaaaaatacaaaaaaattagctgggcatggtggcgggcgcctgtagtcccagctacttgggaggctgaggcaggagaatagcgtgaacccgggaggtggagcttgcagtgagccgagattgcgccactgcactccagcctgagcgtcagagtgagaccctgtctcaaaaaaaaaaaaaggcaaatttttttttttgagatggggtctcactctgttgcccaggctggagtgcagtggtcccatgacagctcactgcagcctcgaactcctaggctcaagcaattctcaggcctcagcctcccaagtagctgggattacagacatgcgccaccacgtacagctttatttttttgtacagacgaggcttcaccacattgctcaggctggtctccaattcttgggctcaagagatccaccctcctttacctcccaaagtgctgggattataggcatgagacaccatgccctgcccaaaatattttttaaagtgtgaatgtcctccaatatgactttaaatttacaatgctgccagcaacacagaacatgtttcttcgaatggtaagattgtttagtttcctaacaattgtctagttttaaaagtacagaatgatggccgggcacaatggctcattcctgtaatcccagcactttgggaggccgaggcgggtggatcacctgaggtcaggagttcgagaccagcctgaccaacatggagaaaccccgtctctactaaaaatataaaattagccaggtgtggtggcacatgactgtaatcccagctactagggaggctgaggcaggagaatcgcttgaacctgggaggctgagatagcggtgagccgagatcatgccattgcactccagcctgggcaacaagagcaaaattccatctcaaaaaaaaaaaaaaaaaaaaagcaaagaatggtctatttgttcagccactcaactcaattaaaatcactgctgaactagcgaggttttccagtttgttctgtaaatgattgcatagtcctgtgcccgtctgtgtccatgttgcagctttcagcttattttaaacactagtgtgagctcctcacacatgatgagtcaatccttcaactgccacgttattccaagtatgtcccctatgaaactgctttttttttcatggctctctttttacagagctactagttttacatgattttacaaaagatgttgaggtttacagtcagcaatgaaatttagggacccctgcaaatttggtcatctttagctaggatgaccacgaacaagggtcagaaagtgggtcacagctttggcccagcaatcctactcctgagaatgtaccctttcaaggagaattaaaaacaataaaactaacagtaataaccaaagcattcaaccaaagatgtcattccagcattttttttttttttctagatggacttttgctcatcacccaggctggagtggagtggtgcgctctaggctcactgcaacctccacttcccaagttcaagcatctctcctgcctcagcttcccaagtagctgggattataggcatgtgccaccatgccaggctaatttttgatttttagtagagacaggtttcgtcatgttggccaggctggtctcgaactcctgacctcaggtgatccacctgcttcagcttcccaaagtgttgggattatagctgcgaacgactgcacccagcccattccagcacttctttttttcttttttttctttttttggagacagagtctcgctctgtcgccaggctggagagcagtggcaagatctcggctcactgcaacctctgcctcctgggttcaagcgattatcctgcctcagccttccgagtagctgggactacaggcacatgccaccacgcccgactaattttttgtatttttagtagagacggggtttcaccgtgttagccaggatggtttcgatctcctgacctcatgatccacccgcctcggcctcccaaagtgctgggattacaggcatgagccactgcgcctggcccattatagcatttctaacaggaacataagcagcggtggggcagcctcatgagatgtgggccctgctgccacctatcccgctatccagacagggaactgaggcttgcagatgctaactacatgtgaacccaggtctgtctggcttcagaaacctctagtaaaaggcagcatgagtccagcatcaagggaaaggtgaggtaatttacattaggtcaatatcaggatgtagcaaaggctgtggaaacaaagagggctttctggcaatcatgtagaagagcaggcggtagcattttcagtccagcatgcctgcagctgcaggaaaacagggggaacatcaaagactgtgggagggtaagtgggtgggttataaccactttaggttatcggtgacttttcttccttcatacagtatgccatcactttgtgagggattggggagtagggtcccttaagccctgagcctacttctggaaggatccctctctgggagtaggtgtggccacctgtatgtggtgggacctatctagtgtctagtgctgttggggcttcctgagggtggtgaaagagcaaagaaagtcaggaacaaatgagacttcgccactggactgggggcaatggaaggtgaaaaccacatcgtgggaaaagtgctttctccctatcacaagagttaagacagcatgattaccatgtgtgctcgtgacctctgggatgtctgggctgtgagagtccattctgggagcttaggaggaaggaagagggaaaccaaacagctcatcacttctatttctcctccttggccttttcctctccccagaaagccaatgataactgctaattagcaggtgtacttaagtgattcaccaactttagccagtctacaaaagtgagtagggcgaaaaggtgtatccactatgtggaatgacctggctgttccctacacatccctcaatacagctcaagcacgacctctccaactttccaggctagactggagcctctcctgtgtcgctttaattctagcacaggggtgactgtttttttgttttggtttattgagagacagggtgattctagcccaggctggagtgcggtggctattcacagatgcaatcataggtcactgcagccttgaactcctggcctcaagcaatcctccctcctcagcctcccaagtagctgggatttcagacatatgctaccacccctggctcacaagtgactggtctttgtgattttcttccctcaggagcctggggattcctcagagacagtgctctgtgtcttttctcccttctagtaataccttgtggggacatgttggaacaagggttccaggccaggtgcagtgactcacacctataatcccagcactttgggaggctgaggcaggtagatcacttgagctcaggagttcgagaccagtctgggcaacatgattctctacaaaaaaatacaaaaaaagttagccaggcatggtggtacatgcctatagtcccagctactcaggaggctgaggcggaaggatcacttgagcctaggaggtcggggctgcagtgagccatggtcatgccactgcactccagcctgggtgacagagcacgaccctgtctcaaaaaaacaaaaacaaggaaagaaagtcaacccttctttttttcaaaggttaaaaagaaaaaaaaaggaacaagcgttcttaaccttggctgcagaaaggtacgaatcccccggatgatataggtaaaattgtgcgtgaatagatgagcattttttctggcaatggccacagctttctaccaaattcccagagaggtatttgacctaaaaatgtctaaaaatttttatttttctgagacagagtcttgctctgtcacccaggttggagtgcagtggggtgatctcagctcactgaaacctccgcctcccaggtccaagtggattctcctaactcagcctcccgagtagctgggatttcaggtgcgtgccaccacacccggctagtttttgtatttttagtagagatggggtttcaccatgttggccaggctggtctcaaactcttggtcttaagtgatctgccgcctcagcctcccaaagtgctgggattacaggcatgtgccaccacacccggctgtctaaagacttctatggtaaacagcagattcctaatacacattcacagaatgaatggcagacatatattggccaatgtgcgttttctactaaaatcctgatatgtttccaattggctaaagaacttctgtgtaaaaaaatctcgaataaaagacattaccaaagaaacacgaaaaacaacaaatagaaactttggctgatttccttaccatcactcagactacttggagccttggcctgaatttcaggtttcgtaggaggaatcattttctcctcctctcgcatcggctctggttcggctttcttaacctggaggggacatccgctgctgactagccaggccttcaggtggtctatgtactctcgcccaaacaaagtggagtcttcgaagtttggaaacgcagcaggtgagggagctatatcttgcaggccgacagcttctaagattttctcctgccggaaagaagaggccaaggaaaatgtctgtcccaaaagggccaaagacttccggcagagagagttggtggtttctagggcaagagccaagtccagggggttactgagggtcttcatcttgacacttagctcgtaggcattgcaggccataagcaaaggtgtgacactcttcagaagccggtcttgaagtctcattatgtacttgtcaaaaggctttatgatttcaaaaaagcaatttttggtcttcacagcacctttgtctaaaagcatgtttaaaaactcattatcaactctgggtgttttcaaagcagagtgctttaaaaatttgatagtaaaaaagcaaaaatctctgtgctctggttttaaggaacatttgaatgaggcaagcattttagcacaggtttctgtttcaagttcaaagagagtctggaaaagttgggaaaatttaatatcatcttttatggtgtggaatcctgcccatttgattatttctatcccaaatcttgaaaaaacatcagacttatctatgatgtcaaagctcatctttcttctggggagccgaagattcttcagatccagccccagagggatcttctgaatggggaactggatatcttctgtccctgggtttgtccccagggtcacatcaggacttggagtgtttttctggatttggttagtgccctgagttttgggagtaatacgattcacggtgggtattttttttgtgctcacatttctcaatgtgacaagtttcccaacaccccccttagctgtgagcaggccctgagtctccccctttcctaggagggaaccttcctggtcaacgatgtttagagctcgacctctggcctggacttgactgccgcccctaagcacagagtcagcctccccaggatggtccacgtcataatcccgactctccttctccaaacactctttctcaatcagcctggaagatccaaagtcccccaaaactgcagagggaccaaaactatactcctgtgaccaagaggactcttgagaaactggatggccaaagtcttgttcccaagaaccacggagcgcaaatttccagtcctgagaacggaaatgccccaatttccggtggccaatgacctggtcccgagaatcagagtgagaaaattccagatcccggccacattctttgcgaaagtagctgtcatcactgatggaagggttgcttgatctgaaggaaggccctggaaatacgtcacttctcaggccttctcttccggcatctctagagtgagctacagatccactgagggagtatctgccatcgctgtggacgtcatcatacatctctgctctggatcttgggactgcccttaagagatctgaaataaaccatccaaaaaaaaaaaagaagaagccaaaagatactttagaccagagaatgcaaacagtgcaaacaaacagtccacggatcaccaggcagcaaaactgctttatacacctcagtgctttttgccaatctgtatttgctgccaacatttaaaatgcgtgtggtgtcacttaaaaatctggatcgactacttactaaaacagaagacctataagcaccaagcctgagtttgccctgatgacgtcaacccaggctgggcagtagcagcctgacgggcaagacacagactctctaagttggcaccaacagccctcgctcattcagatccccctactctctagccatctgggttgacaatccctcttttagtctgaggaaagggtgtttggtccccaaataacctggatatttttactgcaactggagcacttctgtgtttctacttctatctcagaacagacaggttttattgaggctacctgccttcactgcctcttagaaggaagtctcagcccacagtgccaccgtgaggctagaggaaccatagctaacaccacacccaccacagctgacccaaagctggctgaacccatccctcggaaaggtcggccaggccaatcaaccctctctctggagctgaaaaaccacagaccgaggcaggcaggagggaaggcagaagcttaacaagatacatcaagagaggccatgatggaaactgaacagtgcccaattctgtccttctccatgtagaaaaggggaaatgggccaggcacagtggctcaaacctataatccctgcactttgggaggccgaggtgggaggatcacttgagcccaggagtttgagaccagcctgggcaacatagcgagaccctatctctgtcaaaaataaaaaagggcggaggggaagatgtacttgcatttgcttaatcacacatggagaaactgtaagaagcgaggaagagaagtgaactacgggcatatgagaacagtgggcctcagggagagttttcatggaatgcctttctttctagcttttcaatcagaatcgatgacctagttaaaaaaaaaatcaaatgaacagggaaggagaggtgccaggaggtagcaataggttaagaggccacaggaagccaaagtcgtatataaatcctagttcacttgttcaacaagtacaaactgggcacctactgtgcgcaagcactgtactaggcactgaagttacagcaagaaaatgagaactcttccaaacttgtcagttgagagagccagacaataaacaaaaatatatcagatgcaagttaagtaccaagaagacaaatcaagcacgtgggaacctgaggaggcaatgacattttgagacaggctagtcaaggagggtagctctgacacttttttttttctttttttttttgagacagagtctcgctctgttgcccaggctggagtgccggagtgcaagggtgcgatcttggctcaccgcaacctccacctcccaggttcaagcgattctcctgcctccgcctcctgagtagctgggaatacaggcacccgccaccatgcccggctaacttttgtatttttagtagagacagggtttcaccacattggccaggctggtctggaactcctgaccttgtgatccgcccacctcggcctcccaaagtgctgggattacaggcgtgagccaccgtgtcacgctgcatagctctgacactttatctagcagcagtggcctggcatgaggagccagaccgtacagttacaaagggaagccttccaggcagagggggaatgaggacaagaccctgaggtgggaccagtagggggccaatgtagacagaagggaacacagggaatgaaaggccaagtggtaggaaggcagctcccaaactctgctactggagccccagggaccacctccccagacattcttacttaattaaataaggggatgacctgggcatcagggtttttaaaaggcccccaggtgacgctaacgtgctacaaagttagggaaccactaatataagagacacaaatggagaaggagtaccagatccaagtcgggccctcagtggtactctggaatttactctgggagagacagaaggctagtgaagagttctaagcagagggatgatctcactggctgctgcacagggaacagattaaaggagatgagcacagacgtggatgttcctgcaagaaatccactgtgataacccaggtattgatgattggtattgatggcatgattagggagggaacattagtgacagagagtgatggctggattctactcaagagaattttctcataccctttatgaggagatgaaaagttcagagtggagcagagaaacagagaaaggctaaacgatagactgctttgcaacacagaaatgttccagaatcacctagcatactgctaggtttctagtcctctcccacccacggccccctaatctgtcttttttttttgagacggagtctcgttctgtcacccacgctggagcgcagtggtgcgatctcggctcactgcaacctccacctcctgggttcaagctattcttctgtctcagcctcctgggtagctgggattataggggcctgccacatttttgtatttttagtagacacggggtttcaccatgttggccagactggtctcaaactcctgacctcaggtgatctgcccaccttggcctcccaaagtgctgagattacatgtgtaagccactgcacctggccgtctttttttgagacagggtctcactctttggcccaggctggagtataatggcacaaacacagcttactgcagcctcgacttcctgggcacaagcgaacttcctgcctcagcctcccaagtagccagggccataggcgcatgccaccatgcccagataaatttttttttttttgagacggagtcttgctctgtcacccaggctggagtgcagtggcacaaccttggctcgctgcaacctccgcctcctgggttcacgccattctcctgcctcagcctcctgagtagctgggactacaggcgcccgccaccacgcccggctaatatttttagtagagacagggtttcaccgtgttagccaggatggtctcgatctcctgaccttgtgatccgcccgcctcggcctcccaaagtgctaggattacaggcttgagccactgcgcccggccattttttttctttttttttttttgagatggagtctcgctctgtcgcccaggctggagtgcagtagcgcaatcttggctcactgcaggctccacctcccgggttcacggcattatcccgcctcagcctcccaagtagctgggaccacaggcacccacaaccacacctggctaatttttttttttttttgatttttagtaaagacggggtttcaccattcacaggatggtctcgatctcctgaccttgtgatcctcccagcactctgggaggccgaggcgggcagatcacaaggtcaggagttcaaaaccagcctgaccaacatagtgaaaccccatctttactaaaataaatacaaaaaaattagccgggcatggtggcaggcacctgtaatctcagctactcgggaggctgaggcaggagaatcgcttgaatccaggaggcacaggccgcagtgagccaaaatcacgtcactgcactccagcctgggcgacagtacaagactctgtctcaaataaaaaaaaaaaagaactagtagagcttaaacctgggcagcggtgacagggatggagccaggaaatggatccaagaacctgtcttggggctgggagcagtggctcacgcctgtaatcgcaacatgctgaaggcagaggtgggaggatcacttgagcccaggagttgcagaccagcctgaaaacatagcaagactccatatctattaaaaaaaacaaaaaacaaaaaaaacaaaaacataaaaaacaccaaaaaacaaaactgggctgggctcggtggctcatgcctgtaatcccagcatcttgggaggccaaggcaagtggatcacctgaggtcgggagttcgagaccagcctggccaacatggtaaaacctcatctctactacaaatagaaaaattagctgggcgtggtggtgcatgcccgtaatcccagctactcaggaggctgaggcaggagaatcgcttgaacccaggaggcggaggttgcagtgagccaagaggcggaggttgcagtgagccaagatccctccattgccctccagcctgggagacaagagtgaaactccgtctcaaaacaaacaaacaaacaaacaaacaataaacaaaactgtcttgaggtgggtcggggaggatatccagtgagaagctccagataactacataatgatgactgacagatcaaaacattatcccctgaccaagtgcagtggctcatgcctataatcccagcactctgggaggcagagatggaaggatggcttgagcctaggagttcaagggtgcagtgagctaaaactgcgccactgcacttcagcctgggggagagagtaagaccctatcacaaaaaagaaaccaaaccaaaataaaaacctttacctcctcctaaataaggaaactaaggatcagaggactggtattatttgcccaaggtattgtaatcttcctgccttggccctaagatacacccctaccaaaacaacaactacaacaacaacactttattttaccttgagctttaaactgaagagtttcgcttacagcctcaccactggcatccatgtgatatcgtttggctttttcttgtaatacagcatcaaaagtctcctgtgtaattcgtctggctgccatgttattttgccctatggtgagagagaaaaaaatacactaagagcaacaacttggagctgggcgcggtggctcatacctgtaatcctggcactttgggaggtcgaggtgggcggatcacctgagctcaggagttcgagaccagcctaggcaacatgatgaaactaaaatacaaaaaattcaggctgggtgtggtggctcacacctgtaatcccaggactttgggaggctgaggtgagcggatcatttaaagtcaggagttggagaccagcctggccaacatggcaaaaccctgtctctactaaaaatacaaaaattagccgggcatggtggtgcctgcctttaatcccagctacttgggaggctgtggcaagagaattgcttgaacccaggaggcggaggttgcagtgggccgagatcatgccactgcactccagcatgggtaacagagtgagactccgtctcaaaaaaaaaaaaaaaaaaatttcaccaggcatggtggcacgtgcctgtaatcccaaatactcaggaggctgaggcatgggaattgcttgaaccagggagacagaggttgcagtgagccgagatcatgccactgccctccagactgggggacagagcgagactgtctcaaagaaaaaaaaaatgcgtgctcacagaacctgctctatttcacttaatcctcgaagtaaggaggcagtaatccataatcctcgcatggtacttcagaggcaagctggaccctttttatttatcttttttttttttttttttaagtagagacagggttttgctaggttggccaggctggtctcgaactcctgacctcaagcaatctgcccaccttgtctggactcttttaagggggtctctgccctcacgaagttcacaggtgtgtgctggctgaaaaggagcaagacaaaccttctctgggcccatctccttggaatccattaaaagcagctctgtgaaagcagttctatctgctggaggaaggtgtcaaccaacacacataactgagcataacagagtaggaagggtgggaccacaaccctcgcaaatcgtggttaggaaagaagagatcaatcttttttttttttttcttcctttttttgagactctccctgttgcccaggctggagtgcagtggcatgatctcggctaactgcaacctccgcctcctggactcaagcaattctcctgcctcagcctcctgagtagctgggattacaggagtccgccaccgcatccgactaatttttatattttaggtagagatggagtttcaccatgttggccaggctggtcttgaattcctgacctcaagtgattcgcccgcttcggcctcccaaagtgctgggattccaggccgtgagccactgcgcctggcccaggatcactcttttcccattcacagactcagcagggcacagaggctctgagaacttccttcccttctaaaagaagcctcttgacagtgagtggcgggacccccaaccaatgacaatgaactagtgacagttcattctgcgctgggtccttgcgcgatctcccaaccacccactgaagaggcgggtcctgttatgaatgacattagggtgaggaggcaaagggagacagactcaacgacccattcaagaccagacagcccagatttgaacctggcaaaaagggtattcgtgcatccaaagccccgaagaatgagtaaaaagattaagcaacattttggggtccaggggctgcatccttaaccatcaagatatcccgcttcgcaaaacctccaacttcaagagacaacccgtagggtccatttcccatcacgatcaccgcctcccccacccgcctcccccagtcccatccttcagcccttttcccggggcgcccccttgttctctgctggcaaagggcagggttcccgggtcaggtgacccaggttcaaatcacacgattctaagctttctgtgcttccgtttccccacctatggaatgggcagccagtaaaggggctggtgtgggggctgaaccggttctaaagagggcaagggcccgatgcagcgctgggcgccgttatctcctcccgagcgggggccgctccgagttcgggaggaatgaatgaacgactgaaccaatgagcctttgtggacgcggcccgccgtctcccggcctctgcgggcgaggaaatgggggcgccgggcccgggaggccgcagccggccacccaggccaacccggcggggacgcggccgccgccgcagccagagggccgagcctgcgacgccatcacggagcccggggcgggcccccaaggccgagcccgagcttcccaccccgggagccacccaccgacgacgccagggcccgggcctcaccccgagaccaccgcgcgcggagccacccccgccgccgcctcaggctcctcacccgccgccgccgccgcgcgaggcggggacatgcaaatgaaccaacggtctccgcagcgccgcgccgcgcaggcgcaagccgccgccgagtcctggtgcgcaggcgcgggccgccgcggcccggctctcttgcgcaagcgcgctgtccgcttcttctgggcggacgctctggaggcaaaacatttccctgctgggggcggcgaccaccgtgagcgtcccggaaggggcggcaaagacgcctccgtcgcgcacgaggtggcctcgttggctttaccttggttcgcggtcgtccttggttatcgtgagcgtccgcgagtctctgggaggccaagcctaggggcgccacagcgcctgcgcgcgtacggcggccggaaggggctagaggcggctccctgggtgacaaccgcgcgccccacctttccccacgtggccgcgaagaccgggtgagacgctgcggctgccgaggcctgtcccgcgcggagtggggagtgggggtgccgcagggtcgggctggcgcgaccctcgggtacgtggtttggggggaaaaaaaaaatgaaagaattttacagaagccgcctggggacaaaatcctcggcttccctggcattcgctttattttcattcattttatttattcattcagcacctgtgcactgagtgcctgctgcgtgtcgggccccgtcctaggcagtggggacaaggaggctacagggtacaaataaatgagtgaacgatgttgctctagatacaggtaatggtgtgcaaataataacagagtgatgggacgggaaagcagggctgctctttatctagaagtggttttgaaggctgtctcttgagtgctgggaaggatgagaaaggcggggaagaggaacttggaaggcttagatagagaaggtgcggataaggaggctgggttttgttctgagagggttgggaagccactaccgggctttgagcacgtgagtgaggtggagtctaggctctgggagtggcaggtgacgccgcccttaggggaggctggtgtttgaaccagagtgggtgtggctggtagagggacatgtggatggagtcttttagagtccccagcatgtcatggcacacgtttaattttcttttgagacggagtctttctctgtcgcccaggctagagtgtagtggcatgatcttgactcactgcaacctccacctcccgggttcaagggcttcccctgcctcagcctcccgagtagctgggactacaggtgcgcaacaccgcacctggctaaattttgtattttttttttttttgaaacggagtcaaaaggagttcaagcgatctcctgcctcagcctcctgagtagctgggattaccggtgtgcactatcttgcctggcctttttttttttttttgagacggagtctcgttctgtcacccaggctggagtgcagtggcgcaatctcagctcactgcaagctccgtctcctgggttcaggccattctcctgcctcagcctcccgagtagctggaaatacaggcacccgccaccacgcccggctagtttttttgtatttttttagtagagacggggtttcaccgtgttagccaggatggtcttgatctcctgacctcatgatccgcccgcttcggcctcccaaagtgctgggattacaggcgtgagccaccgtgcccggccctggctaattttttgtattttcagtagagacaggattttgctatgttggccaggctgttctcaaactcctgacctcaagtgatctacccgcctcagactcccaaagcgctgggattataggcctgagccaccgcacctggacagcacagttttcttgatgagcagattcctggctgagagaaggaaactggctgccagttaggggccttactcatcttctgttttaccctcagcatgccctgatggataatagggactggtaatgctgcttcccccttttagcctaggctgttctccaggtaattcttacttggccatctccaggcaccatcttatgtgttccaaatctgtactttcctcctccaactcagccctgtaccagatctaggggaccttggaggactcaggtcaggggtggtcacagagccagaccttcccaactcagtcagctcaggggtgggtggaagggaggggttgtgggttggggagtgaagccagagagtgtgggctctctgagtggccaggaaaggcagccacctggaagggctggcagaagctccacagaggactgagaatccgaagtatttgagacaggtgtcaatcagttagaaagcttattttgccaaggttaaggacatgtctgtgacacagcctcaggaggtcctgacaacatgtacccaaggtggttggggcacagcttgcttttatacattttagggagacgtgagatataaatgaatatgtgtaagatggtcacaggtagagacaaatgattgctttcttttgagtctttggtcagcctttcacagaatacacgatttatatggggtacagggcaggtagaggaatagtcatttatgcctcagtccgactcatgaatctgaggttttgtttcttgttttttgttttattttttgagatagagtctcgctctgtcgcccaggctggagtgcaatggcgcaatcttggctcactgcaacctccacctcccgggttcaagcaattctcttgcctcagcctcctgagtagctaggattacaggcgcccactaccacgcccagttaatttttatatttttagtagagacggggtttcgccatgttggtcaggctggtctcgaattcctgacctcaggtgatccaccggtgtcagcctcccaaaatgctgggattacaggcatgagccacggagccaggccaaatctgcatttttacataaacgttagggcagagagagcaactggatatgcatttgtctcaggtgatgactttctgtcctgcacttgtgaagatcacctgtcaatttacattgccagggtgacattcaacaaaattgttttcaggtaaagatcttgagggccacaaggaatttcctggcctggccggggtggtgggagtggagtcccctactccttactccctactgagaaactctttatattactcttccttcacctttaaccttggaaatccatagcagcccttaaagagctcccttttcttctggggcagaaaggagaggggcctatctgcaaaagagtgagatgggactcctgcataaacttgctgaattgcctcttaagcaacaaaggaaaggaacaaatagctaatttattgagcctgtccatatcctgttctgaggaaggtataggagttggctgaatttttcactactgccctatgaagtagattcgtgtttatctctgtttgacacatgagggaattgaagaaaagtgtatctggctgggcgtggtggctcatgcctgtaatcccagcatgatgggaggccgaggcaggtgggtcacctgaggtcaggagttcgagactagcctggccaacatggtgaaaccctgtctctactaaaaatacgaaaattagctgggcgtggtggcgtgggcctgtagtctcagctacttggaggctgaggcacaagaatcgcttgaacccaggaggcagaggttgtggtgagccaagatcgtgccactgcattccaacctgggcgacagagcgagactctgtctcaaaaaaaaaagaaaagggcattgaagtggagggcatgggaactgggttctgcaggctggctgcgagccagtccttctcccgtcaggcagtgtgcagtccatggtgggcatctgcaggaacacagatggaatgtgtatatcccatgccactgcctgaaaagagaagcatgggccagagtgacctgtttctttttcctttttttttttttttgagacaaggtcttactttgtcacccaggctggagttcagggatatgatctcagctcactgcagccttgacctccctgggctcccacctcagcctcccaaatagctgtaactacaggtgcatgctcccacacctggctaattttggtattttttatagagatggagtttcgccacgtgtccaggctggtctcaaactcctggcctcatgtgatccttccgcctcggcctcccaaagtgcaggccaccatgcctggcctgaagtggaaacttgataattccagaacggaaacttgatattactgcaataagcaaggtggatatattgaaacaattaaaatttaaaaagttgttaacctctgttaggctctggacctaaggcctgttcctccttttgttccaaagggacggtggcaaatgttaggttcactcgtaccctgtcaagaccttctggttaagatcatctacagcaggggtccccaattcctgggtcacagacccatactggtccagtggtccctggcctgttaggacctgggctgcacagcaggaggcaagcgtagggtgagcgagtgaagcttcatctgtatttacagcaactccccatcacttgcattatgcctgagctctacctcctgtcagatcagcagcattaaattataggagcacgaaccctactgtgaactgcacatgcaagcgatttaggttgggcactccttatgaaaatctaatgcctgatgatctgtcactatctcccatcacccccagatgggactgtctagttgccagacaacaagctcagggctcccactgatcctacattacagtgaatagtataattattatattacaatgtaacaataatagaaataaagtgcacaataaatgtaatgagcttgaacaatcctgaaaccatccccaccctagccccaccatatccatggaaaaattgtcttccacgaaactggtcccttaggctaaaaaggttgggactgctgagctacaggtttgaaacagaattgcaaagggatttggtgtttttaccaagagttttatcttacttaactctatgtcttgttcccacctgtcagagtggaaggtactgcccaaggttagtgggtcatctaagtgttgatacctacccctggtttccagggtatgcctatactgggttttacttgtttgtttatttatttattttttgagacgaagtcttgctcttgttgcccaggctggagtgcgatggcgtgatcttgtctcactgcaacctccacctccctggttcaagccattctcctgcctcagcctcccgagtagctgggattacaggcgccccactaatttttgtatatttagtagagacggggtttcgccatgttggtcttgaactcctgacctcaggtgatctgcctgccttggcctcccaaagtgctggtattacaggcatgagccaccatgcctggccttacttgcttatttttattttataaggtgggtttgtgtgtatacacacacacacacacacacacacacacattttttttaagagatatggtctcactgtgttgccgcaggctggtctcaaactcctgtgcttgagtgatccccccgccttagcctcccaagttgctgagattacaggcacaagtcattgctcagttctttttgtttttaaacagattagcactttaagaaattgagctataatttacataccataatattcactcatttgatttagtaatttttttttttcttctggagacatggtctccctctgtcatccagaccggagtgcagtggcccagtcacagctcactgcagccttgaactcctgggctcaaatgatcctcctgcttcagcctcccgagtaacttcaaccacacgcaaatgccaccacacctgactatatttttaaatttttttgtagagacggggccttactatgttgtccttgctggtctcaaactccagacttgaaacagtcctcccaccttggcctcctaaagcactgggatcacaggtgtgagccaccatgcctggcctgatgtagtgattttacgttttcacagagttgtacaaccatcatcactataattcaagaacgttttcatcacccagaaggaaaccctatacccattagaagttactccccattccctctcctccagtccctggcaacacccagtctgctttttgtgtctgtggatttgcctgttctggatatttcatgtcattggaatcgtgcaatatgaggcttttcgtgtctggcttctttgacgagacatcatgtttttgaggtctatctccattgtagcatgcttcagcacctcattcctttctctggctgagtaatataccaccatgcgcacagaccattttatccattcatctgttggtagactccgtctccttttctttgttcttgtgatttatttgttgaaaactctgggtgtttgtcctctagttgacattctcttccctagtagggattttgcagatcacatccccatggtgttggttaaggtgtcagagctgtgctgtgcaataccatagtcactcgtcacacatggctatttacattaacaaattaaaatgaaataaaattacacactcagttcctcagccacactgccacacttcagctgtgtgatagccacagaggccaatggcttctgtactaggcagtgcagatagagaacgtttcatcatagcaggaagtgccctgaatgcatgatcagattcgggtttgagattttggcacgatgacttcacaggtgcattttgttcttgttcaggaggtaggtgttgctggtttctcttgatgatgtgagatcaagcagtagactgagttcctgtctaccccttgttgggctcccatcagttttacacctgatggttttggatcctgtgggatcattatctgtttctctcctgtcacagctgatcagctggaatcggaagcagaacttttcctcatcctctttttataacctgggactcatttgtacaagggaggcaggttaagtgctaggttttttttaaaaaaattgttactaattattgtagagacagtgtctcgctacgttggccaggctggtcttgaactcctggattcaagtgatcctcccatctcagcctcctgagtagtagctgggagtacaagagcatgccaccactccctgccaagagctggattcttggccagttttcagaagcctgagctgtatttgttttagtattatgaaagcacagagtttgacttttttttttttttgcaacatcgtctgactgtcagccaggctggagtgcaatggcatgatctcggctcactgcaacctccgcctctgtgctcaagtggttctcctacctcggtctccctgattgctgggattacagacgtgagccaccacacctggcccagattttgattttgatatgtactggatttttttttaatgctcacttgtctcatctgtagctaccaggcatcccttagggtttggaagcttccttgcttcctggtctcacaagaccccagcgttacctgccccatgacctgctgggacttggaatcagccattcctccagaagccctggctccttgtttttaaagattttatgtagagacagggcctccccatgttgtccaggctagtgttgaactcctggcctcaagccatcttcctgcctcagcctcccaaagtgctgggattacaggagtgagccacctagccctggccccagctccttttcgtgggaaatggtagaaaccatacatggtgttagaggtattcagtgctcctgtgctgtcatttctcctaggcatttttagttgctatgactagaaaattagatctttgtttacctaagagaaaacacatgatgggtttatatggatattcccatttcatatataggagttctgagattttttttctcaactttatcgaggtataggatgtacttttttttgagacggaatcttgctctgttgcccaggctggtgtgcagtggtgcaatctcggctcactgcaacctctgcctcctgggttcaaatgattctcctgcctcagcctcccgagtggctgggatcacaggtgcccgccaccatgcccggttaatttttgtatttttagcagagatgggatttcaccatgctggccaggctggtcttaaactcctgacctcaggtcatccacctgcctcggcctcccaaagtgttgggattacaggcatgcgccactgcacccagcgaattgtatttaatatagtgtatatcttatactatatatggtacataaatgatacaaatatattgcatatgtttacattatacaacttgacgattttatatgcatgcagattgtgaaatactcacctcaatcaacagttacctttttcttttttgtggtgagaacacttagaatctaccctcttagcaaatttcaagtataccatacaatattgttaattatagggagttccgagtttttagttgatagtacgatgttagaatcttttttttttctttttgagtcaggggcttgctctgttgcccaggttggagtgcagtggcgcaatcttggcctcccaggctcaagcgatcctgctacctcagcctcctgagtagttgggactacaggcatgtgccaccacactcagctaatttttatttttattttggtagagacagacttttgccatgttgtccaggctggtcttgaactcctgggctcaagcaatcctcctgcctcagcttcccaaagtgttgggattataggcattgacccactgcgcccagccagaatcttttttcttttattctgattcctaataagataatcattattatttgctacatccgtaatagtttcagaataacattactagtatcattatattaaagaaccacctttcttagataaaatgtagtaaactctgtgttctctcctacactttgtttttttttcccaagacagggtctcactctgtggcccaggctggagtgtagtagtgtgatcatggctcactgcagccttgacctcccaggctcaagtgatcctcccacctcggcctctcagagtgccgggattacaggctaagccatcacacccggcctcttctgtatttgcagaagttctagggaagtagggatatcaccctttcctgtgataacaggtgggaagaatttctccagggtggttgtagggctctggtcgctggtagatgcttcctaagtggcgttttcaaggtggccaggccctgccattgcctgctcacccttgaggtagctctctctttgccctaacctctcagctcaggagcatctatcggctgcacgccaacatcaacacaggcgaagatggtctccaagcgcattgcccaggagacctttgatgcagctgtgcgcgagaacatcgaggagtttgcgatggggccagaggaggcagtgaaagaggccgtggagcagtttgaatcgcaaggtagggtggtgtgactgtcacctaccatccttggctcttagatgcaagagcagtgggagagccctgctgccccgccccactgggggtgccacatgcctggcatagaaaccaggtgccattgggccctgtcccctccagcttctgcccgaggcaggctggttatcctgctcccacctctcacctgcttccacctcgcccagatatttgtgggctggatccttctcatgagtctcatttgatcacttccttgaagagactttccctgaccctggcctgggaaacagggcccctgcctccctgccctactctaccctacctcgagcttacagaggcagaagcagcctgtggaaacaggtggcatgttcagaccaggtgcagatgagtgtggttatgaggggctgtttgcaatggtgtgggtggggttaggagaccacccctagcacaactagctccggcagagaccctgactgcagggagcaggagtcctgggcaggggccacatgatgggtgctgggccctggggcagaggcagggggctgggaatgaacaccccacactcccctcctcctgcccccatctcaagttcacttccccattgaacaaacccagggtacagcctgagaggtcagaggtcagcctcctaggcacagagtggggtatagaacactagacaggggccagtgggacaagcaaaagcgtccagcactgtaggggctccctgtgggggtgccagcaggggcaagaatgcagccagagccaggagggatgggagccccaagggagaaggctgtggggtccctccctcccccaccaagcccaccaggcagcatgtggcacctcactgcacagacgtggcctgtgatgacagccttgtgtgacaacggcctcactaccactctgctccctttggcccacggaccagtggcagaaacacccaataccctctacacccccgtgatgatgtggcatgggcgggaatagggaggtgggaggcttctggagtggggtggtcccagcagaagggtcctgaggtgtgattccagcaggcccacggggatgacagctgtcactttctttctgacccctgtgtgcttgcttcccccacccccaacaggggttgatctgagcaacattgtaaagacggcacctaaagtctctgcagacggatcccaggagcccacacatgacatcctgcaggtaggagtgggcatcccacacagcaggtcctgcgtcacctctgtctgggggcacctcttccctgtttcctggatggcagaatacaggctctgaaggtcatgccctccccagcatgcatgggcaagcttgagtttgcagccaggtctccctgagtccatgtccgagggcggcatgccttccaatgcaggggatcccaggctcctgtggtggcatgtatgctgaaatcaggtagatggcttggttgtccctgctgctgggatcccagagtcagggacaccatagaggtgcccctctggcttcccagagacagatggtcaggactcataggacgagagagtgggctcacagtaaggctgtcacttactgagcactgactgtttaccagcactttccagccagtccgttagcactgaagctcaccagtgaagtaggtggtgtcattcctgtcttagtgatggggaaacaggccaggagctggcacttaacctctccagagaccgaaagaaggaaggtaaaagaacttcaatgctttccgtaaggtcgcccatcaaactttgtaatacagcagaaggctccggtgtttgagaaccgactgtgggcctggttctgtgcaggtacttttttcctgtcttcttggtcactgtccaaacaacacctgcaaggctgggatttccccattgtagagatggggacattgagatccaaagagaagagaagtcattgacatgggagcaggaggtgcagtgataggagaggaagttggaagagacggctctgggtgtaaacccggcttgcctaaggcatgacacttacttctccctacctcggggtcctgccctctcctgccttgaggaggtcttgtgaaaattgcctcgttgttgttagtttgctttttgcctttcttgcctaataaggatgaatttattttattatatatatatttatttatctattgagacagagtctcactctgttgcccaggctggtgtgcactggcgtgatctcagctcactgcaacttccacctcccagattcaagtgattctcctgcctcagcctcccgagtaactgggattacagacacacgccaccacacctgactaatttttttgtgtttgtagtagagacgaagtttcactatgttggccaggctggtctcgaactcctgacctcaggttatctgcccgcgttggcctcccaaagtgccgggattacaggcatgggccacagtgcccagcctggatgaatttattttaaaatgagtttgtcttctggctatctttgcattgggtgattcatctttttcctactgatttgtagatgaagtttatataggaaggatctcaataacaatatcgtctatattgtctagcagttactgcttaagtacttcttaagtgctcagcattatgctaaattctttttttttttgagacaagagtctcactctgttgcccaggctggagtacactggcgcagtcttggctcactgcaacctctgcctcttgggttcaagcaattctcctgcctcagcctcacaagtagctgggattacaggtgcacaccaccatgcccagctaatttttttttttttttgagacagagtctcgctctgtcacccaggctggagtgcagtggcgtgatcttggctcactgcaagctctgcctcctgggctcacgccattctcctgcctcagcctcccgagtagctgggactacaggcgcccgccaccatgcctggctaattttttgtatttttagtagagacgaggtttcaccatgttagccaggatggtctccatctcctgacctcgtgatccgtctgcctcggactctcaaagtgctgggattacaggcgtgagccactatgcccggcctattatgctaaattcttaaaatatgttctcttaatctgtgctcagcccatcttgctggtgaggtatctgaggcttcccaaggatcagtgaccacgcccctgcaccccgaaaggtcagctggtgagaggcagagctggtacccggatccaggaagcaaagcactgaaaggccgttctaccagcagtacaggaaactccgtgtttgtttataacattcgctcctttttttttcttaactgttcttttatttattcatttatttattgagacagagtctcgctctgtcgcccaggctggagtgcagtggcgtgatcttggctcactgcaagctccacctcccaggttcatgccattctcctgcctcagcctctggagtagctgagactacaggcgcctgccatgacgcccggctaattttttgtattttttagtagagatggggtttcactgtgttagccaggatgatctcgatctcctgaccttgtgatccgcctgcctcggcctcccaaagtgctgggattacaggtgtgagccaccacgcccagcctatttatttattttttgagatggagtctcactctgttggccaggctggagtgtagtggcccttcctcagctcactgcagcttccttctcccaggttcatgcaattttcctgcctcagcctcccgagtagctgggattacaggcgtgcaccaccacgcccagcggatttttgtatttttagtagagatgggatttcaccacattggacaggctggtcttgaactcctgacctcaagtgatctgcctgcctcggcctcccaaagtgttggggttataggcatgagccactatgcccagcctattttttgttttgtagagatgggatcttgctatattgcccaggatgatcttgaacacctgccctcaagtgaccctcccactttgccctgccaacatgccaggattacaggtgtgagccaacatgctcacctgtttttttttttttttctttttctatttcttttttttttttttttgacacaaactctcactctgtcacccatgctagagtgcaatggcaggatctcggctcattgcaacctccacctcccaggttcaagtgatgctcctgtctcagcctcctgagtagctgggattacaggtacctgccaccatgcctggctaattttaaattttatttttcattaaggaagagtggaaatacattcttagcataaaggattcaagcaatactcaagcatttatagtaaaatctgaaagtccctgccttgtccctcccaccagacactggggtttgcatctcagcggtcagttcgcaactgaaccaacccccttctcaaatgccctgcagcataattgacctttgtgcatcttggcttagatgtgtaaaaaatgcttatctgttgagggagaaaaaaattcaacattgtgatggtcgttgaaattaatctgtttgtgtcataagatttgttgcaaacaggcttgtagaaacagaaggaaaataatgtctggagactgtccagggaaaaactgagccagccaggccacatttatatgtgggaagttgtagaatgaaaggcattagtcacagagactgaatgactccaggagtcaatgggtaaagcccccctccatgagcaaggtggtgagcgccacagaaaattgtcataggtagaacacagctggctctgccacctgcattttagcaaccatctgtcaatgaaaatactctataaaatatttcaagagatttattcggaaccaaatatgagtgaccaaaggcccatgacacagcctcgggagctcctgagaacatgtgtccaaggtggtcgggctacagcttggttttatacgttttagggagacatgagatatcaatcaatacatgtgagacgtacattggtgtggtctggaaaagtagggcagctgaaagccggggcttccaggtcatagacacatttaaagatttttctggccaggtgctgtggctcacgtctgtaatttcagcattttgggaggctgaggtggtcggattgcatcgagctgaggagtttgggaccagcctggccaacatggcaaaacccatctctacaaaaaatacaaaaattaggccacgtgtggtggctcacacctgtaatcccagcactttgggagcccaggcaggtggatcacctgaggtcaggtgttcgagaccagcctggccaacatgatgaaaccccgtctctactaaaaatacaaaaattaaccgggcatggtggcaggtgcctgtaactccagctactcaggaggctgaggtaggagaattgcttgaacccgggaggcagaggttgcagtgagccaagattgcaccattgcactccagccttggtaacaagagcgaaattgcatctcaaaaaaacaaaaaacaaaaaacaaaaattagctgggcatggtagtgggtgcttataatcccagctacttgggaggctaaggcgggagaatcacttgaatccaggaggcggaggttgcagtaagccgagatcatgccactgtactccagcctgggcaacagaatgagactcagaaaaaaaaaaaaaagattttctgattgaaagagttatctaaagacctagaatcaatagaaaggaatattttgcttaagacgggttgtggagatcaagggtttatcaaggaagcctccaggtagcaggcttcagagaaaatagattgtaaatatttcttatcagacttaaaaaggtgccagactcttagttaattctctcctgaatcagggaaaagacctggaaagggaatctctgtagaatgtagcttttccccacaagagatagctttgcagggccatttcaaaatatgtcagagaaatatattttagggtaaaatactttgatttctttccatactgtattagttaggctggaacttggtgtcttattgctacaaaaaagtcttacgatgatcagttatgtctgacttccaaaggcaggaagataaaatgagacatatttgaccgccacttcccatcatgacctgaagtagtttttcaggttacctttggaatacctttggccaagaggaggggtccttagtatggatgaggacttagatttttttttttttttttttttgagacagggtctccccagctagagtgcagtggtgtgatcttagctcactgaaacctctgcttcccgggctcaagcaattcttcagcctcagcctcccatgtagctgactacatggtgtgagccaccaacatctggctaatttttgtattttttttagagacagggttttaccacgttgcccaggctggtcttgaactcctgagctcaaagcgatacacctgccttggcctcccaaagtgaagagattacaggcatgagccaccatgcccggccaagaattttatttttagtttacacatccttgctaacttagtaattccttgtgaaatcttggtagttctaactccaatactgtgcatcctcaaaggcatttctgtcaggagcttttcaagtttcttacagggtttctgctgaagtgctacaccgctgtttgttatgtaaaatgtgcataaaaacatttaccattgtaaccatttttaaatgtagagttcagtgtcattaagtacattcataatgttgtgcaaccatcatgactatccatgacttgcgatactgaaacaaactccatgttcctcttcccctcagcctctagcaaccatcattctaccttctgttgctgcaaatttgactactccaggacctcatataaatggaatcacaggctggccaccctggcttatgcctgtaatcccagcattttgggaggctgaggtgggcagatcactttgaggtcaggagttagagaccagcctggccaacatggtgaaaccctgtctccactaaaaatacaaaaattatccgggcgtggtggcacatgcctgtagtcccagctgctcaggaggctgaagcgggaggattgtttgaacccaggaggtggaggttgcagtgagctgagatggtaccactccactccagcctgggtgacagaggaagactccatctaaaaaaaaaaattttttttaaataaatggaatcacagtatttgtcttttggtgactgtcttatttcacttagcgtaatgtcctcaaggtatatccatagcatactatgtgcctgaatttctttgttgtcattgtagtgtttttttgtttgtttgtttttctttttggagacagagtctctctctgtcgcccaggctggagtgcaatggcacgagctcagctccctgcaacctccaacctcttggctctgatgaatcatgctgctatgaacatgggtgtacaggtatctctttgagactgtgctttcagttctcttgagtgtatccccagaagtggaactgatgggtcacacagtaattctgtttgattttcttttttgagatgaatgctccgtatgttgcccaggcgagtcttgaactcctgggatcaagtgatcctcctgccttggcctcccaaaatgctgggattacaggcatgagccaccacgcctggcttctctgtaggtttgaattgcatttttcctaatgattagtgacattgagcatcttttcatgtattagtggccatttgtatgtattctttgtagtaatgtctattctagtcatgcacactggtgttaacttaatttttgttgttttttgtttttcagttctaatctcattttagcaaaaacttacctttttaaatatcctgttgcattgtaacatatacttaggtccacaaatctgagctcagtgaggattatcccataggcttctttgtttttcgtgtcagtcaatgccaaatcaaagccctttgggctggtggtttctgtagaaccaccctgattcagtctgagggcaaataatctcctacacttcaggctcacagattcatctttggctcatgctaagacatgtcccgaggtcatgtagttgaatggcagctaaacttatctgagttgtttaaagtattttctccccagtggcttagagttgaatttggataaatctgctctctgtacagtgtaaccacatttggcaggtgctcaataaatgtttgtggagtgaatgagagagatgaaaggagacatcaggatgggtatgtctggtgaatgtggctttctccttccttggagagctgaccattgacaggtgtgccagtttgttacagctgtgtgacaaacaacccaaacaacaggcatcttattgtttcttgtgattctgcctggttgggctcaactggatggttcttctgctggtatcgcttggggcctcttgatggcaggtagggctggaatgtttaatatgtctgcatttatgtgtgcagcccttcggcagggacactgagttgtctggatctctctctctctctctgtgtgtgtgtgtgtgtgtgtgtgtgtgtgtgtgtgtgtgtcagtcttccacgctatggcctctgaagctcaaagctcctagaatcacaggtctggaagttgccagagctgtaacttgccccacatcacttccactgcaggcccagatcccaggggagggaaccttgcaggggtccagacactgttgctgtggccatgggttcctcttgcctgagctgatgctgaggtttctcccatgtctcccagatgctcagtgacctccaggagtctgtggccagctctcgcccccaggaggtgtcagcatacctcacccgcttctgcgaccagtgcaaacaggacaaggcctgccgcttcctcgcggcccagaagggggcctaccccatcatcttcactgcctggaagctggccactgcaggtgaccagggccttctgctccagtccctcaatgccctgtcggtgctgactgatggacagccagacctcctggatgcccagggcctgcagctcctagtggccacgctgacccagaatgctgatgaggctgacctgacctgctctgggatccgctgtgtgcgtcacgcttgcctgaaacatgaacagaatcggcaagacctggtgaaagctggcgtgctgcctctgctgactggtgccatcacccatcatggccaccacactgacgtggtcagggaagcctgctgggccctgcgtgtcatgaccttcgatgacgacatccgtgtgccctttggccatgcccacaaccatgccaagatgattgtgcaggagaacaaaggcttgaaggtgctcatcgaagccaccaaaggtaagagctgggggccgacacgagccagcgaacaaagtgggcgggtcagatgtgaccagagtgagggtcagggctcaggactgctttaggcacggcaggctcaaggctccactcgcccctcggcttagacctgcctgcatggcagccctcgtgaagagtctccccatgttttctagtggctccaggagaattccaggccagcactcaggggccaggagcaggccacaatcccatctctggagctgtctggggaaggggcttgctgtgtccaactccaggggctgagagtggggaagggggacctccccagagggaaataagaggactcgggggggctggctggcatgcaccatggcagtctcagctggatgtgtacacgcttgatcatattcagccacaaatccttaggcatattcatgtgtctggctccagggtgaccatggtgagccagccctgggaggtcacagtgctgaccgtcagaccctaaagcttctgtcttaacccctacccccatcccatccactgaacccaccagaaaagtcctgattgacacacagaaggtgttaggaggatgagttcccctttcttgcctgccccgtcactctggttctgtggccaggcctgtgtgggggttctggctctgtctgctgaggagatgggcccacctcagtctcccttccacacctccagcaaggctgaaaatgagtcccgaccttctgcaaagtcaggctgcttttccaggaggtagctcacatctttcctgttttatttataggagctccaatcagttaggtttctgccagagacaggatatgtatatatgaagagactttttggtaaggaatgggatcatgcaattatggcaagtctgtactccatagggcaggctggaaacccccaggcagtccccttttcggggaaacacctcagtttccttctaaggacttcagctgatggaatgagtcccattcacattgttcaaggtcatctcctctacttaaaggcaactgggctgggcatggtggctcatgcctgtaatgtcagcactttgggaggctgaggtagaaggattgtttgggcccaggagttcaagaccagcctgggcaacatgatgaaaccctgtttctactaaaaatacaaaaattgctgggcgtggtggtgggcacctgtaatcccagttacttgagaggctgaggcacaaggatctcttgagcctaggaaggagaaattgtggtgagccaagatcacgccactgcactccagccttggtgacaaagcgagactctgtctcaaaaaaattaataataataataataataatagatagctgattgtggatggtaaccatgtggacagaatacctccacggcaacacctagattggcattgggtggaactgcagagggctacaggtggtcacaggaactgaccgtcgcagccctgtgtaggtgcaggatcttcgccctcttggcgtgagtgccggcacctgcttcctggtgcagcgcctctgggctccatctgcggctcctgtgttcagttttggccacgtcagcccagtccgtatgtgtccctctatggttctggagtttcctgttgcacttagagaagccattcctaccccatgatcataaaaatagtcttcagatgtctttttttttttttgcactattatagttttctttttttaggtgagaccatgagttggtatggaatttatttggggcatgatggaaggaagcgggttggggggcacattcttaagtcttcccagcagccagcagggggcactgcaggcccaggtagcccctggtgttccctggggccttcctggtgcccgtggccactccaataggcagaagggctggactcttccagtggagcaggatctccaccaaaacagagggccctgcggctggttcttcccgcccccaccaccgtctccctttctccctgcagcgttcctggataaccctggcatcctgagcgagctctgtggaaccctgtcccgcctggccattcgcaacgagttctgccaggaggtcgtcgacctcgggggcctgagcattctggtgtccctgctagccgactgcaatgaccaccagatgagggaccagagcggcgttcaggtatgaagtccccctggcccattgcgtgctgtccttctgggtcccagtcaaccggacgagctatagtcagaacaagccagccctgcctgccagtgtcggaaccaaagtgcagtttttcttttcacggacccaagggcaggaaccaaaggtcgggggggaaacaaacccacctgctctcccttattgtccttttgcaccaggaaaaggatggtaggaagcatagggttggggtgtgtcggccaaggctgggatacttgggttagttcccgcacctctgcctcagtttccctagctacagaatagagcagtgtccctactcattactccgtttagcagccgattattgagcccttctccatgtgcccatccacagcagggagccaatcaacaggtgcctccctatccagctgcagctgcaggaaagcccccaggggtgccacggtcctgcgcccccaagcccagctgttgacgtcagccagcctctttctgtgcaagtggccaggagctgaatgggaaccaacttcagcaaatgaagggatacattttgccctgtactcctgggcagttgggggcagggtcctcaggttctccatcgggggatcagcagtcccagtagcacctcatccactgtcctcagtgcagggcagttagcgcctaccctgggtctgtggccgtggacagggggaccctgtgctctgaaggccggcctgagtcacatgcccccgctgcccctgtcggggtaggggatcaagtcacctggatggtaccgtttggacacaggcagcctgagccacaggcatctgccaccccttctcgttagtcacaccctgcagtcacaccatacctgttggtcaaacagcaaaacagccccacattctccctcagagccctctcccacaaccagcggcctggctggaggtgagcgggcctttcccttgtgcaggagctcgtgaagcaagtgctgagcaccctgcgagccatcgcaggcaacgacgacgtgaaagatgctattgtccgtgctggtgggacggagtccatcgtggctgctatgacccagcatctgaccagcccccaggtacccacctcggggggcacacacagtagcagggtggtggctggagtcccagttcagtttctgtatctgcatgaagctctattcccctgcagggccagggcagggctggtgagggtcgtgggcattggctctcaaatgctgacctgcgtatgcatgactttgggtgtcctggagttaccaccagcaccctgcaaagatctgaccaggcctattgcccttgtcacccctaagagctgagctgatatttttgtcaccctgccattattacacaggagttgccagagacccacggaggggaggccgcagggtgttcaccaggggttggtggccatggcaggatgttgtggggggtctatctgctgcatctcagcctttctgtgactggcccctgcaggtgtgtgagcagagctgcgcggccctgtgcttcctggccctgcgtaagcccgacaacagccgcatcatcgtggagggtggcggggctgtggcagcactgcaggccatgaaggcacacccgcagaaggccggcgtgcaggtgggcagggcaggggatgggggcaggcaggctggtgtgggatgtgcaggtaggtgcagagagggcatgggagcaggtgcggtgtgcgggtgggtgatggggcaaaggctcagtccctatccctatccctgtccctgtccctcccacagccgagccccatagggccaacttctttctcatcttgcaaaatgtgctgaattctgccttcatttgcctccttctctgcctttgttttttctgcatttactctccttttttggggagggggtagtttggaggggctttctggtgaaaccctggaaagaaagctataacacgtaatctccttctgtgggttttttttttttttttttgagacagtctcactctgtcgcccaggctggagtgcagtggcgccatctcagctcactgcaacctctgcctcctgggttcaagcgattctcctgtctcagtctcccgagtagctgggatcacaggcatgggccaccacgcccagctaatttttgtatttttagtagagacaaggttttgccatgttagccaggctggtctcgaactcctgacttcaggtgatccacccacctccacctcccaaagtgctgggattacaggtgtgagccaccgcacccttaatctccttttttaaaagtccctatagagagatctggggagaaagaagttggggaagcgtggatggggatctgcctggggtttcagaaaggtttctgccccctccttgggctgctggtctgagttctgagtgtgggacaccctgtccacacctccctggctgaacccagactcctccgtgcagcccccggggccctcctcgcctcctcactcccagcataggattcttggacacaccaggctgggacccacagggggcctttgctctcgctggctcttactctgggacactgacccttacctggtctgaccccttgtccacttctggccaccctggccagcagttccccactctgcatgcgcttcccacctgctgtcctgctggtggtgggagccaccctgggaagcttccaggcagtgccccgcgcccacccacagcaggtgcacagggcacaaatgtccactgaatgggtagggatgtaattgacaggtgcctgtgcacaaccactgtcttcccgtggcctcactgcccccttgccctagggccccttccttggctctgtgccagcctcgggggacctcaggctcaccaactctgaggctgagagttccaaagccataggatagatcctggagcttccctgagcctgtttccttgcctgggagttagccatgccttgtggggctgccaagagggtaaagtagagagatgggtctagcttgatacagtataggcagctgctggatgtcagctgtggttatgatcacctccatcttgttatgatgaagaccctgaggtcagagtggaccccaccccaaagccccatctggcagctcacagctgctctctcctacagaaacaggcttgcatgctgatccgaaacctggtggcccacggccaggccttctcgaagcccatcctggacctgggggctgaggcactcatcatgcaggcccgatctgcccaccgtgactgtgaggacgtggccaaggccgccctgcgggacctgggttgtcatgtcgagctccgagagctgtggacaggccagaggggcaacctggcgccatgaccccaggcccagtctgggccgtgactctgggtgagtcgtgtgactcaggaatgggggtagatccatgtcctccactgtcccccattagttctgtccccttcacaatgagaagtgttttctggcaggccctaggtaaagggtcgggggaggggggagccttgtagggaggcctctacacagaagaaagcagcccccatgtcccagccacttctgggtcccagccagcagcacggatgttactgtcctgctccttcccccagccccacgccctaccagagggggcaaagggcacgtcccatcactcactgccctgtctgaaatgtggcagccactgtgggccaggctcagggcagggcaggcgattccagtggggttgggccccctggcgcctgctgcttactgcagtttcatgcaggcctctgctccttgtctttcttacctgtaaaatgggtctcagatgctccgccctgcttggccccagcttgtctgtctctgggtcctgggccagccaggatacctgataataaaagatcattgggtgaacagcggaggggtctcttccatagcttggctgagcatggggggccacagtcagtggcctcagagtgtgggggagagacagacattttggtggggggggccatggagtcactgaggatagcaaaggggttttgggaacagccagggatctaggatctgctgtcaccctcagacaggcaggcgctgaggccatggtcaggatcactgtttctgacgtgtaccacctgcagggccggagggctccacgttcatcccctactcagctctgcggccttgagcaagtgaaagaacctctccgagcctcaatatgctcctcctaaagtgaggagtggggcagtgatagatcgccctctgagaggtgttggaccaggctgagcacatggagggtgtccagttgtcttaggctgggtgtcctaggtacccaacctcttgtctctgagcctcgatttccccatctataagatagacatcggcgggcacggtggctcatgcctgtaatcccagcactttgggaggctgaggtgggtgggtcacttgaggtcaggagttcgagaccagccttgccaatatggtgaaaccccgtctctactaaaaaaatacaaaaatcagcccagtgtggtgacgtatgcctgtaataccagttacctgggaggctgagacaggagaagtgcttgaacccgggcagcagaggttgcagggagctgagatcacgccactgcactccagcctgggcaacagagcaagactctgtctcaaaaaaaaaaaaaaaagacatcattgttgttgccctcagtgaccaccccaccccaagcattctgggggtgcccagacagctgtggccctgcagaccccagctcttctgctctgaagtcacactcagaggtcacaccgtggtcactaggtggcttgtgcatctcttgtggcctcacgggggtccgggcagcctcatgaccactggtgtgtgccctagccttcctgcccacaccttggaggcctctcccctcttggaccctcgcccctgcttgtcatgtgcctccccgagccccaggatggcctgggctcagtccttgacctcagggacactcctttcccagcaggcccccagcttccgtggaatccagccgatgcaaacagctgaggagcgtcaccctggctgcacctctccgtggtgtccccgtctcccctgcccccagcaggaaagggtgctctcagctcagcagggctggcccaaacctctgacccagtcaccccgccctatccctcctccctggagactcccaggatgtgggagaaagatctcgaatctgccccagactgccctgacttaacttctgggccagtgtgaccttgggcagttctcaagcatttcttcatctgtcatgtggcggggtaggtgctcctgagctatttcgaggacggcctgcagtgctggccctgtcattcctgctccagccttgctctcagtctgcccatggctcccctttgccttctacataaaaccaaacctgtctgtggtcccagcaacttgggctaaggcgggaagatcacttgagcccaggagtcaaggctgcagtgagttaggatggcaccactgcactccagcctgggtgacggatcaagagcttgtctcaaaaacaaacaaacaaacaaaaaaatgcacttcatgccctgcagacccagtatggcccaggccttgcccatttcccagtctttccactgtactcactccctattcccccaccccagggcctttgcacaagcccccatgtgacaagccatgccctctgcctagaagtgcccttcccttggccttccccgtggccggctcctcctagcacatgaggtttcagctcacgttgccttctccaggagagacccccatctcatcacctcatgtgctctggctctgacactgggccccatctgaggtcacctcatttgtgaactctcctgtttgtcttgcccccaccatcggctggctccctgcagggaggcccctgtccccacttgctgtgccttcagcttcccgtcagtgtttttgagtgttcacctgaataaactgacaagcactcgaggtccctgccaggtggccccagcgtcctcccctgggcctgggccaagctgcaggcttcttcaggaaggggtggttctgccttatctgtccctcccaccttagcccaaggaagtgggtgtcttcagtagatgcagctagcatgtttggacagcctcaggttgggtgggggcccctcaccaaagatctcacatttccctggggttatggcctggctttccatcccccctcggccacttcaggcatatcacctcccgtctgtgagcctcggccttctcatctgaactcaggctagatctggcacactggagggccacagcccctagaaaggcgcgcttcaggggatgtccagaacataactccccccagcccccatccccgtcgccttcccttttctgtcacccaggctggagtgcagtggcgccatctcggctcactgcaagctctgcctcccaggttcacaccattctcctgcctcagcctcctgagtagctgggattacaggcgcctgccaccacccccggctaatttttttgtatttttagtagagatggggtttcaccttgttagccaggatggtcttgatctcctgacctcgtgatccgcccgcctcggcctcccaaagtgctaggattacaggcgtgagccaccgcacccggccctggccttctcttaagtagcttttgctgtcctccttgatgacatcgagacctgggctgaggtggagcctgctgcaaggatggtgcgagtgtgttcaggccacgcctctgctactgtaggctcttggtgaagtggcctgacttatctgagccttgggaggtgaatgaggccactctgaccccagccaggcttggttgttgtcactgctgtgttcaggatgtctccctccagccagggatgggcttgggctcctgggaaaggaacacagattttttctgttgtgaacatacatctcccagaggctggactaaacctcattttccagataggaaatagactcatgggcatttgaggggctgcggtgggatgagaccacagcttggcctgcctccaggcccctcatctttttccaaagctgttaacctgaccttgggcaaaaggcctttgggcctcaggtgattaggcctggacgctgtgccagggcctggctcacagatgattcctgggatccccaagaggtagaggagactggagggcgaagaggcagtgtcctgtccagggctggccagccaaagcagaagagccgagatcctgggcaccctagctgggcttacatgagtgcccatggtgggggtgtccattgctattgccaaggtgctttgcctgccattgctggaaggcggtagggaggttggctggcgccagcctgctaaagaacgagcagaagctagagaggcagccccaggctgggccagagcctgacctttgccttagttggctctgtccctggaggcactgtgggaccttccaggagctttgttacctccccctcccagggcctggcaggtgggcactgggagtgggcgctcctcggcgtagatatctccctcttggtgtggcaagccacgcccatagttggtctgtgtccatgaagcgctatttacagagagggaaacaggcccagagaagaacaatatatcatcaccagccttccatgagtgcttactgtggacgaagccattgtaagtgttttgcttccatttcatcaatgctcacatcagccctaggagacagccgggaaactgaagtggggagcttgtgttatttgctgaaggtcctgtggctgttactggccattacttacgttaaaaagagcagggattcaaactcagccctgggtccttccaccaaggaatattctccaccataggctcagttttcttatctgctaagtgggcactgtcacgtccacctggaagtgaggtggggagatggtattggagaaagcccagtggggacctggcacccaattgatgttcaactgacctcagcttccccctcttctctggagggcagaatggaggccagatcctggaagttgccaggaagcaaaccacaggtgggaggtatgggagaggaggtccaggtaggcatatcgtgagaatatcaggagtttgatgatggccttgggctagtgatttcccgtcacatcctccccatttgaaacttgtggatcacacacttagcaggggcttgtgcagccctgaaatgtgagccctttctaaggttggtttcagccttgctccctcccaggattccctggttctgaacttgatctccaccaaccctggccagcacctagaggaaataagagctggtatctggaaacatttgtagccctctccatcctgaagatgaagggtgagtcatagaacagagtggcttcgggggaggtgccgatgacacagccatgcctgggatggcaggtgtctccctaaactgccggcatttttctgcacttcacagaggagctgaggctcacaggccgcacatgacctgctcagggtcaaatgctttcaccagataattaaaatgagagctgagttgtaaattttcccagggaagcaaccccagagaggaaagatcaaggcataggaatcattttcccccctcttttccaaatgaaacagctgaggctcacaagggcttttgcccaaggttgtgtggtgggccagtgattggacaaggattcaaacccaggtctctgaggcccccagtggctcttctctgacacactctttccaaaaagcaggctgctctagattcattctctggtttagcaaccagagaatgctgtgtaaccttgggcaaggagcttgacctctctgtgctctggtttctgtaaaaggagccagtggtctctctgacctcatgggattgtggttaagattcagttaattcaaaaaaagacttggcagggagaaggcccaacagggatgtcactggataccgtggcggggaaagctgggacgcagagaggtcagacactcagaaaaccacgcagcgcgtttcagtaggattccgccccttatttccatgtcttcacaccacctcgagatggagagggcagttcagagtgacctccagcgaatctgccctctccgtgtcgtctgcaggggattagtggggagtaaggggatagagaattatccaggagtccttcagccttgatggtccaagttcacatccgcttctgtgctaggtggccagagggcgggctctacacgagagcctcaggggaccctgcgccaggcgtccgaggccacgtcgggttgccgcgctccgggtcggactgcaccttgaacgctccagccctcccctgggggcgtaccgcccacggccgctgcgactggccgcggggcctgccagtcttcggctttgcggccaatcccggtctccccccaagctacgccctccgttcctctcgcctctgccccaccggtagcgccagtttcttcgtagccccgcccctggcccccagcgattggccgacagttctgcctgttttctgccaagattccaatcctcgcctgcctccaggccctcgcctcccagcgcctagcaccctgagggaccactcaggcaccccaggcctctcccaatagccccacctctgccaatcagcgattggctttaggggctgcccatctgcttcatactcgccaatcactgtcgcttccagcgctgactggccagggagcagccaatcggggcgtggcgtggacccctcccgtggcgcgctctgggggtgcgcgaggcggggccgtggcggctggaggtagcggcggcggcgacgcgtccgggccggtgagggggcgcggggggcgccgggggggcccaagcgtcagcggcccgcgcctgtcgggctgaactgaggtgaggcacgggtcctgtcatggatcccggggcgaggggcggatgaggcggggcatgacagtagcgtcgcgagggcaggaagaggttaaagaccccccccaaccccacactccacgtctactgccccctgggggctactgcatccaggtttgagcccgtcacccgcagtccacgcacgcctgacaccacgtcccttttcgttgacatcccccatacactttagactgtccttgctgacatctcccacacccctggggccttgtccccggcgccccgcacagctgggtctgacatccccctcacacacctgacaccgcgcccccactcacgaacacccgcccccactcacgaacaccccccacatcacctgagtctgtccttgtcgatgacacccccacacccacacctgagcctgtgactcctaactcatggcctcgcaactcacacctggacctagtcccgtcccccactgcctttcctcatatccaggtatctgctcgctactctcgtgcccactcccccagcaacctgtgtctctcttctcagggaccttccccctggcacctgccctctgccctggcagccccacacctctgtctcccccttttctctctcccaccttgggctttcttccacgtgcacctgtgttcgcacaccctctgtaataatccccccgaatcccccaggtcctccaatagtcccccaagccttggtatctcaggatcgctgcaccctcccctccccaaacaaaagcttaccccagtgttcatttctaacagtgcttgacagtctataaagtgatttccggaccttagaataatcccatctgtcagaccaaaccggaatcatctccattttaccagccacagacctaaaccacttgaatgctagaggcagagcctattctaccctgggcatcgctgaccctctgctgtggacccaccgcgtttgggcccatctgttatgtttatctcagagggattggcaggagtcgtgactttgactgggtccggaaaggcttagctggaagggacggcccctctgccaagcgtgtgtctcggagtcctggggcaggctggcggtggagacgctgccggaggaggggggctcatcatcttgggtgcctcctgcaggatgccggagagggggttgccggggccggggctcccagctcttgcagacccgggacccctctccgacactccctgggcccttgaagccgataaagagtaaggaaacactctttagagtgaggcaaactaatgtttcagctgtttaaagctaacctgcaaaacgagcctgggtggtgctaggaatgattcttctggaattttttagttcccttgagtctgatttgcaagcatgcagcatagaaggaggacagtggctttgttgttgaaaagcaataacgtgccatttcctgtaaggctcctggagcgtttcttaccccctcccaccgctccctgcaaagacggtaccagaatgtttcagagggtcatgtcaccttcagcttctcctgtggaaactgaagccatttgggttttctgtccaacttcaataggagtcatttaaaacatatatgggcatgtatgtatatatgtatgtatatgtgtgtgtgttgtacacatatgtacatgtacctataatattcatatgtttatatacatattttatatatacatatttcgtgtgtgttatatatgtacatgtgtataaactttggcaagatcattgagtatatagtttttgggttttttttgagacggagtcttgctctgttgcccaggctggagtgcagtggtgtgatctcggctcacggcaacctctgcctcctgggttcatgcagttctcctacctcagcctcctgagtagctgggattacaggcatgtgccaccacacccagctaatttttgtatttttaatagaaacggggtttcaccatgttggctaggctggtctcgcactcctgaccccaagtgatctgctcgcctcagcctcccaagatgctgggattacaggcgtgagccaccacacccggcctattatatagttaaaaagaaaaaatcaaacagtacaaaaggtcacatagtagaaatcagtcaggtcttccccagcctgtaccccgttcctcctcagatgcacctgctgttgataatttcttatgttttcttccagaggtagtctatgactggggtggcagaaaggggtcgggggaggtatatatcccccaccccttttaaaccactggtaaatttgcattgagcagacatatgcattctaaggccagtcccttactgatggctgtttaagctgcagcccatattttttttttctttctttttttttttttgagttggattcttgctctgtcgcccaggctggagtgcagtggcgcgatctcggctcactgcaagctccgcctcccaagttcaagccattctcctgcctcagcctcctgagtagctgggactacaggcacccaccactacacccggctaattttttcatatttttttagtagagacggggtttcactgtgttagccaggatggtctcgatctcctgaccttgtgatcagcctgcctcggtctcccaaagtgctgggattacaggcgtgagccactgcgcccagccactgcagcccatatttagcttttacaaacagagctgcaatggatagatgcatgcatcagcatgtactaaatacacattgaacgtatttgggctccagccgtgctcagacacttcagacccccctgtcttgctggccatgcctgtagtccacagttactcaggaggctgaggtgggaggattgcttgaaccaaggagttcaaggctgcagtgagctataatcatgccactgcactcctctccagcctggacgacagagctagaccctgtctcaaaaaaaaaaaaaaaaaagggccaagtaaaagggcatattcctcctcctcctctcaactgtgaagttggaaagcctgattcctctcctgtggccagctcagttatcttactatcaagttttgtggtctgtcccatctgataggtaaaaaacagcacaagagatccttttgaacatcacttccatgcttcctacccctgtcttaggtgttctggcttgtggggtagggattaaacattagacttgtttctctgccagtcagactaaagttcaagaaatatttggggctggatgcagtggttcacaccacccaacactttgggtggatgaggcaggtgtattgcttgagcccaggagtttcagaccagctcgggcaacatggtgaaaccctatctctataaaaaaaattttaaaattagccgggcgtggtggcgtgcgtaaatagtctcagctagttgggaggctaaggtggagaactgcttgagcccaggagttcaatgctgcagtgagctatgattgcaccattgcactccagcctgggcaacagagcaagaccctgtttttctgttaaaaaaaattttttttgagttcctgctctgtgaagcttgtccctatagcagggagcagtggtggtgctgagattttggctcaaggtacctcaacaagaacagttgctagaagaaccatttagctgttgctgatttttttttttttcacttgggtctaggaaaagaaagatgagggcatcatgagagattgagacgagtcagatgttaaatctgtctgggaagctgtttcgagactctctccaattgtccaatttctcaccactggtgccagatggagggtgtcgtcatactgaagtcaggcctctgcccacgtgtcatacagttttttttgtctgtctcttctattttggcagttagacattaagaggggattattgagataatcagaatcattcgctcgtttgggttttgcaagacagagcttttaaaagtgcatttgcattttttattttaaacatgaaatacttcttcataaaaagtatattggccgggcacagtggctcacacctgtaatcccagcactttgggaggccgaggcgggcagatcatgaggtcaggagttcaagaccagcatgaccaacatggtgaaaccctgtctctaccaaagaatacaaaaattagccaggcgtagtggcatgcgcctgtaatcctagctactcaggaagctgaggcaggagaattgcttgaacccgggagttggaggttgcagtgagctgagatcacaccatcgcactccagcctgggcgacagagcgagactctgtctcaaaaaaaaaaaaaaaaagtatatcatgtcgggccaggcatggtggctcacgcctttcatcctagcactttgggaggccgaggcaggtggatcacttgatgtcaggagttcaagaccagcctagccaacatggtgaaaccccgtctctactaaaaatacaaaaattagccgggcatgttggtgggcgcctgtattcccagctactctggaggctgaggcagggagaattgcttaaacccgggaggcggaggttgcagcgagccaagatcgtgccactgcactccagcctgggcaacagggcaagactctgtctcaagaaaaaaataaaaacaaaaatagccgggtgtggtggtgcatgcccatagtcccagctactcgggagactgaggcaggagaatcgtttgaaccctggaggcggaggttgcagtgagctgagatggcaccactgcactccagcctgggtgacagagcgacactcagtctcaaataaataaataaataaataaataaataaataaataaattagctggccttgttggcatgtacccatagtcctagctactcaggaggctgaggtgggaggatcacttgagctcagggggttgaggctgcagtgagccatggtttgtgccactgcactccagcctgggtgacagtgaggttctgtctctttaaaaaaaaaaaaaaagtatataacatgtatgtgaaaagaaagaagatttaaccaataataaaattagcacccaactcaggaagtagaacgatgtcccctggaggccccaccctgttcacagagctatttttaaaatatgcttgtcaacatttgttttcttcactgagcaccttttgctactaccatcttgggcagaatgcttggattccaggggctcaacaaagttctctgctggccagattttctgctgagctctctgccagcccagcagcctgtgaggttctggcaggcaaatggctgaggacaagccaccagctgaggggcaggccaacacttggaggcttggcctcagatccctgcatattcgtttcccgtggctgccataataaattaccacaaactggggggcttcagacaacagaaatgtatcctgtcgtagttgtggaggcctaaagtccaaaatgaaggtgtcaacaggactggttccttctggaggctctgagggagtccttcccaggcctttctccgggcaaactttgaagttcttggctcgtggctacatcactccagtctctgcctttgtattaatgtggctttctccctgttgtgtgtgtctttgtgtcctctattttttctttctttttagagatggggtctcactatgttgttcacgctggagtgcagtgatatgatcatagttcactgcaacctctaactctttggcttaagtgattctcccgcttcagcctgctgagtagctgggactataggcgcaggccaccactcctggatctcctcttctttttttttttttttgagacaagctcttgctctgttgcccaggctggactgcagtggtgcgatcttcgctcactgcaacctctgcctcccaggttcaagcgattctcctgcctcagcctcccgagtagttgggattataggcatgcaccaccacatccagctaattttattttttatttttttgagacagagtcttgctctatcgcccaggctggagtgcagtggcatgatctcggctcactgcaagctccacctcccaggttcacaccattctcctgcctcagcttccagagtagctgggactacaggtgcccgccaccacgcccggctaattttctgtatttttttagtagagacagggtttcactgtgttagccaggatggtctcgatctcctgaccttgtgatccgcctgcctcggcctcccaaagtgctgggattacaggtgtgagccaccctgcctggccattttttttttttttttttttagacagagttttgcccttgttgcccaggctggagtacaatggtgtgatctcggctcaccgcaacctccacctcccaggttcaagccattctcctgcctcagcctcccaagtagctaggattacaggtgcgcaccaccgcatccagctaatttttgtattttcagtagagacacggttttgccacgttggccaggctggtcttgaactgacctcaagtgatctgcccaactcggcctcccaaagtgctgggattacagatgtgaaccactcccggccgatcccctcttcttataaggacactagtccttgggtttagggctcaccctaaatctcaaggtgaactcatcttaagatccttaactgattgcatctgcaaagaccctatttccaaagaaggccatgttctgaggttccaggtggacatgaatttgggggatgtcattcaacccttatacttgctgagctagttatttccaacaggacattattaagggaaatgcttgttcaggtacctctgttacttcaggaagaataggccaatggggtcggacacattcctcagcccctccagatggctcatgttggcagctttgcttactcacctgtctccctcggaaggtggaggcatccagatgctctaagccaccaaggacctgactagtgaatgcataccgtctttttttttttttttttttaatacagggtctcactttctcactttgttgctgaggctggagtgggagtgtggtggcaagatcacagctcactgccacctcgaattcctgggctcaagtgatcctcctgcctcagcctcccaagtagctgggactataggcatgcaccaccaagcccggctaacttttaaattttttgtagagacagggtttctccatccttcccagactggtctcaaacccctgggttcaagccatcctcccgcctcatcctcccaaagtgctggaattagaggtgtaagccgccacgcccagctccaagtgtgtacatcttaattttgctttctgggctgtgagcttggtcctgtgattatctcctgttgatacctggtctcagaaggatggggagcatggacacacatcagaccaccaccaagtgattggagttccatattggtcagtcttgaggagaagctggggtgctacggtctgatcttcagggggccagggagattttcaggaaactctgggagatctgaagctaatgaggaattaactacatggcagagccaagggctagcagaaagcaaaattagggctggtgcggtggctcacacctgtaatcccagcactttgggaggccgaggtgggcggagcacctgaggtcaggagtttgagaccagcctggccaacatggtgaaacctatctctgctaaaaatataaaaattagccagccatggtggcaggcacctgtaatctcagctactcaggagactgaagcaggagaatcacttgaacctgggaggcagaggttgcactgagccaagattgcaccactgcactccagcctaggcaacaaagcgagaatccgtctcaaaaaaaaaaacaactaaaaaaataaaaataaagggatgttctttgatgagcagcgggacaaatcatctaagttttgtttcacattgtagggagattaacctgtggggggatgctcagactggcatggggcgacccaggatgaatgagggtcttcaggtggtgagattaggcaagtgggatcttgctgtgttgcccaggctgatctccaattcctgggctcgagctgtcctcccaccccagcctcccaaagtattggaattacaggcgtgagccactgtgcctggcgaatgtgtacatttcaatcatggatcatggggaagccatgtgtcagtgtctcaaaagcatactcaataggccggggccgtgttaaatgggatttgccccagccctgtctgattccttattagggagaacgatacttaccaatacttgtcacccactcgagtggcactatcctgtgaagatggtgacagatgaggaaatcaaggaatggggaggtttattttttactttaaattttttgtttgttttttcagagtctcactgtgttacccaggctggagtgcagtggcctgatcttggctcactgcagtctctgcctcctgggctcaagtgattctcatgcctcagcctcctgagtagctaggattacaggcgcctgccaccacgcctggctaatttttgtatttagccaggcgtggagacagggtttcgccatgttggccaggctggtctcaaactcctgacctcaagtgatctgcccgcctcggcctcccaaaatgctgggattacaggcatgagccacctcactcagccaaaaaattttttttagagacagggtcttgttctgttgcccaggctagagtgcagtggtgtaatcacagcacatgcagcctcgacctcctgggttcaagtgatcttcccacctcaacctcctgagtagctgagactataagtgtgcgccaccatacctggctaatttattttgtagagacagggcctcactctgtcacccaggctggagtgcagtggtgggatcatagctcactgaagccttgaactcctggcctcaagtgatcctcctgcctcggcctcccaaagtgctgggattacaggtgtgacccactgtatgtggcctatgtggaggtttagtgacacatccaaggtgtcacatgctagaccccatcatcccacaacacagtgtgtggtggcagggagcctgtgcatgctgctgtgtggctatgaggaagagaatgattgaagtggtgcattcttgctgctgtgggagggatggctgaagagcaggaggacaggacagcaacaggcaaaagcacctgtctgcagctgttatgtttctgcttccttgctgggcatggacactgagtgtgacatggacccttgccttccagggacccctgccttccagggacccccagcctggttgcagggaagcaagtggagagtggcccctcaagtgcagcagagaaccacagactgctcagtgcagggcagagcagttaactttgggggcagtgaggccaggacatttaggagctttgaaggatgcagagaagtttgccaggatcggagactgcggccaaagcaaaacttggcatgtccagggaattaattcacttgtccagcaaatagttgttgaaggccaatcaaatgcggattgctgtgccaggttccgtgtggtaagaacatggggcttttttttttttttgagttgaagtctttcaccatcacccaggctggagtgcagtggcatgatcttggctcactgcaacctccgtctcctaggttcaagcaattctcctgccccagcctcccgaatagctgggattacaggtatgtaccaccatgctggctaatttttgtatttttagtagagacggggtttaaccatgttggccaggatagtcttgaactcccgaccttaaatgatccatctgccttggcctcccaaactgctgggattaaaggcgtgagccactgtgcccagctaatttttgtatttttgtagagacagggttttaccatgttgcccaggctggtcttgaactcgtggcctcaagtgatctgcccaccttggcctcccaaagtgctgggattacaggcatgagccaccacgcccaaccaaacatagggcttttgaggcgaggacagttactgaagtagaccctcttagtggaggaatgtgagtaccattcagtaccttggattgttttagataacatctaacggcctttggtgacaggtgtgggcagcactgtctgcaaggacagaggacagcaattgatcatagaatttcctggatctttcagggtgtttaacccatagagaccgcaacaagggttgccttaaccaaagattgtctgaaaggcacacaggagcaaatgcagcaggaagaaactccccatttgtgaggcagcctgcggggttggggttaacgggcagcagccattatgtaagatgtgcccggatcccttaggcagagttaatgcttattaactagaaaagaaaacagcctttatcggctggcagataggatgttaattggcttccgtttactgagagattacaggatccatttcacggctgcttataataaactccatccacagagaaactgtccccacccccacccaacatttgtacaaacatttcctgagtcccaaggggtggagctggcagttgtatggtggtccccacaaggtaacagcataaacggtgggcctgtcttatgtctggtcgggaagctatgagacaggctcaagggaatcaggcacatgtgcatatgagtctgtgtgtgtgtgacagtgtgtgtgagagagtgtgtgtgtgcgtgcgtgtatgtgtgtgtgtgtgagtgtatgtgtgagcgagtgtgagtgtgtgtgtatgtgtgagtgtgtatgtattaggatagcctgtgtacatggggcttataggatgcttgggtttgaaattgcctgattcagaacaagaagcagccttgtggctgggcgcagtggttcacacctgtaatcccaacactttgggaggcagaggcaggtcgactgcttgaggccaggagtttgagaccagcctgggcagcgtagcaagaccccgtctctactaaaaataattttaaaattagctgggcatgatagtgtacacccatagtcctagctactcagaggctaaggtggaaagatcacctgagcccaaaagatggaggctgcagtgagctatgattttaccactgcattccagcctgggtgacagagtgagaccctgtctcaaaaaaaaaagaagtagcttgtcctgccctctcccaagcaactgtcaacttgcttggaaccagtgttcccattgctctggaggttctatgctgaggctggtgtgatcatgagttatcgaagatcccatgctccaggttcacgtttcctgaataatgctgcttagtaagtcatttcctatgtcatcctcccataccccgccgagctttgttttttgtttgatgaatggaaagactgcatgaacagaagcagcatgggaaaagatacacgtatgttatttggggctggcccccctctgcctggccgctggtagtcacccttgtggggacacctgaatcccagttcagaaagcactggcatcctaggtactcgcgaaaggtacctagagtgaacgtggcaaggctgggcctcggagccacaggacactgtcatctgtggttgtaaatactatgtggggctgggggagtacgaggtacctaccccagcacagcatacgagtcaggactctggcaggtgcaagtgacagaaacccatcctatgctgactgaactggaaagggtgcttcctgggctccatgacagcaaagtccgtgtgcttttggcaccactggctgccagatccccctagcctgcaggtatcctccttcacctcctggccttgctctgccctctaactctgtgtcaactctgccctgcagtctcacaccctactggcttcccctcccctgaagaaagaggacttctccggcccgatggttccctcaaaagtcccagatcttggtctttgggggcagcaccctgaacctaggggagtgtgaagtctcattacctgaccatggccacctgggtcaccctggagtcaaggggaggatcagccccactttcttctccacagtgacagggagcagagcgagtggtttcccagaatgctgtcctcagaagggatggccactgtgcgtgtggaccaactgtagagcttcagtgcctcctccaggctttcatcactgctaagatcatcaacaggtattctcggccaggtgtagtggctcatgcctgtaatcccagcattttgggaggctgaggcgggtggataccttgaggtcaggagtttgagaccagcctgcccaacatggtgaaaccctatctctactaaaaaaaaaaaatacaaaaattggccagacctggtggtgtgtgtctgtaatcccagctactggggaggctgaggcacaagaatcacttgaacctgggaggtggaggttgcagtgagccgagatcatgccactgcactccagcctgggcagcacagtgagactccatcttaaaaaaacaaaacaaaacaggtgttctccacaggttggaggaaagtgggaaagagcaagctgaacacgtccactcccaaaggccatccattcaagtcccctgggaattacaaatggcttgcctgccccactcccaggtttggcatccattggcctgggagggggtgtggcagaggtgttttgtttgcactgtttaaacattttaaattgagatatagcttacatagaataaagcacataaatcctaagtgtatatatagctcagtgaatttttatgtatatatgcatccttggaaccagatcaagacagttttcaagcccccagctggctccttcctgccccctccctgatataccccctagaggtaaccagtattctaatctttatcaccataaatgtgttttgtacttacgtttcttaaaaattgtggtgggctgtgtgcaatggctcatgtttgtaattccagcactttgggaggcagaggctggaggacagcttgagcccaggagttcaagaccagcctgggcaacatagtaagaccccatctctacaaaaaatttaaaatttagctgcgcatggtggcccacacctgtagccccagctactcaggaggctgaggtaggaggatcatttgagccggggagtcggaggccgcagtgagccatcatagtgccactgcactgcagcctgggtggcagagcgagagaccctgtgtcaaaaataaataaataaaaagtgtggtaaaatacacagtacttaaaagtgccatttttaagtgttcagttcagtggcattaagtacattcacactgttgtgcaaccatcaccaccatccgtctccacaactcttccgtcttgcaaaactgaaactgttcccactaaacagtaattctctgttcccctgctcccagcccctggcacctgccattctactttctgtctctatgaatgtgatgactctagggacctcatataagtggattcgtatggtatttgtccttttgtgactggctcatttcactcagcatgacatccccagggtccatccgtgtggcagcagttatcgacatttggatgtgtataaaacattttgtttactgagcttgactgttatgcagacagaatcattcagtatgcagctgggcacagtggctcacacgtgtaatcccagcgctttgggaggccaagatgggcagatcacctgaggccaggagttcgaaaccagcctggccaacatggcgaaaccccatctttcctaaatacaaaaaattagctgggtgtggtggtgcacacctgtaatcccagctactcgggaggctgaggcacaagaatcacttgaatccgggaggtggaagttgcagtgagctgagatcgtgccattgcactccagcctgggcgacagagtgagactccaactcaaaaaaaaagaatcgttcagtatgcaaccttttgtgcctggcttctgcctcttcactggtgtgtctgtgagatccatccgtgttgttgtcgcgtgtagcagcagtttggtgtgttacatagtgtcccatcgtgggacataccacacacgtgttcccattctcctatgggtggtctttggggttgtgtccatagagtgtgctcatcattgccatgatatgctgctgggcaggtcttcaaagctcccagggctgtatatggggaggctggagggagaggcctctatggcaggtgtggcttgtaggaatcttggctgcactgggcagaagcagaggtctggaggtgggagacccagccggcattgggcggtgggggtactttgtgtctccctacaagcacagcctgcaatggcccacttgcattcagcatgaaggtgcgtatgcctgacacagcctcagcctgtttgtttccctggtcagcctgagctcactccagccttgggttcttccttcttgctgttctccctccctggtgtactccttcccttccagatcccaggacagacccctttcccccaccccatgtccctcctcccacatagactctgtgcatatggtcatccttgtgtgggtcatttgcagtaccgatagagcccgtgaaggtgtgcctccgcagagcatgtacgcagcgagcatgtacgcagcaagcatgcagcaagcacacagagggagtgacatacgaatgtccagcagctaatctaattccaagtaacctagtagggagggaaggatccgtaagaaaagggagacccaaggtcatgaacactgcctgagtcagcccagggtgtacccaggctcccaccaccctgttatcctgccagagcagagaagggcctcccagggctggtgggaacctgggcaggtttttgtatgtgtgtcaaaatgcacataacttgaaagttaccattgtgagctttttttttttgagatgtagtcttgctcttgtcccccaggctggagtgcagtggcgcgctcttggctcattgtgagcgttttaaagtgaacaattcagtggtatatagtacagtcacagtgttgtgcaaccactgccttcatctgatttcagaacttttatttttttatttatttttattttttagacaattttttatttttttatttttaatttttattttttatcttgctgtgtcacccaggctggagtgcaatggcgcaatctcggctcactgcaacctccacctccctggttcaagcgattctcctgcctcaacctcctgagtagctgggattacaggtgcatgccatcatatccagctaatttttgtatttttagtagagacagggtctcaccatgttggccagggtggtcttgaactcatgacttcaagttatctgactgactcagcctcctgaagtgctggaattataggtgtgagccaccacacctggccaatttcagaacattttcatcacccccaaaaggaaatcccatccccatgagcagtcactccccattccacagcccccagcccctagcaaccaccaatctggttcctgtctctatggatttacctgttctgggcatttcatatcaatggaacctcacactatgtggccttttgtgtctggcttctctactcagtatcgtgtttttgaggttcatctatgttgtagcatggatcagtgcttcattccttttcatggctgagtagtagtctgtcatgcgaacattttgtatatccattcatctgttgatgagcagttgggttacttccactttttggctgttgtgaatcttactgctaggagcattcatgtacaagtttcattgttgttgctattgtttctattgtgttggggtctcactatgttgcccaggctggtcttgaactcctagcctcaagcatcctcctgctttagcctcccaaagtgctgggattatgggtgtgagccaccatgaccaaccccatgcacaagttttgtgtggaccctttggttctgtgcctggaagtggaattgctgggccacaatagtatctccctgtgtaacttgtgaaggaacctccaggctgatttccacaatggctgccccatctaacattcccagcatacaaggacaccagtttctccacttgctcgcctggcaggttttagtcagatgcttggcaggatgggtgggagtcaggaggagaacgggtgttccgcatgtgtaggcttgtcagccagcactggggtgggatggtgagaccaactctcagatgaggaggccgaggtcctgggagctggtacacttgcctgagggtgctcatctggtgaagagcagagtgggcttgaatctgtgaccctgccttcaagttcacaatgggaaatgcttcctcagcaggtgactgagggtgaagggtcactgcttgtgccccagcagtgacattttagggataaggacagccccaccccctacccattggatccatgagtaaggagacagaaaaggaaggaggcaaggggaggggctctcacccagaagtacagcgtcctcttccttcatttggaccaggctcagggctcagggttctgctgatgaaataggtccctcccaagccaggcacagtggctcacacctgtaatcccaacactttgggaggttcaggtgggaggatcacttgaggccaggagttcgagactagcctgggcaacatagcaagacctcatctctacaaaaaaattaagaaattaaggctgggcatggtggtggtgcatgcctgtaatcccagcactttgggaggccaaggtgggcagattgcatgagcttagtttgagaccagcctgggcaacatggtgaaaccccgtctctacgaaaaacacaaaaattagctgggcttggtggtacctatctgtggtcccagctacttgggaagctaaggcaggagggtctcttgagcccaggagatcaaagctgcagtgacctgagattgcgctactgcactccagcctgggcaacagagagagaccctataaaatttaaaaaaaaaaaaaaaaaagagggagggagagagggaaattaaccaggcatggtggtacacatgtatagtcccagctattcaggaaactgaggcaggagtttggggaatcccttgagcccaggagtttgaagttacaatgagctgattgtgccactacactcctacctgggtgacagagtgagaccctgaaaaaataaaaaaaagaagaaagaaagaataaagaaaagaaaggagggaggaagggagggaaagagaggaagggaagaaggagaaataccctccccacagacttgtcattggggcacatttctgcaggatgtcccaagtggccccagggtgactttccagcactggacccataaggaaccacagggaccaccactatgaccagcctggcagggggtgatgatgagaggaagtgacaccccaacaacagaacctggaaagaagtgtttccagtgccagttggcccgtctgtttttaaataaacagaagcatgtttcatgttttgtcctcatagcgtccctggcagtgtcatgggacactcaggtggtaccactagttctgacaacctcttctcgcttgggaagccgaggtgggggctgatgggcgtaggtagactacctgtcccttatagtgacaaagaggagaatgccactgagggtgggggtcatgggaactggggcttcctccccgaacccatccaagcctccctgtcccaggaaacgacctcaccacctccaggtctcaggcagaacctggacaggctcctgaggcgcccgccacctccctccactgcagcctaccgtccaggccctacgctgtcacccgagtggtcccgtggtgtcctctggcttccttgcctcactgtcctcttcgctcctttagccgagtgacctctgtccctggagacccattccttctctcactagccccatgggctttgcattttgtggctggaatgtggctctgccatgccttggacactgcccctcagggaggccgacctgatcacctggtcactggtcgcaagtctgggtacacgttgtcatgggagtgattggcctcctgggaccactcccactagggctggcagctctagtgtctggttatttgacgtcagcctgacgtccacctcccgtcactcccctggccactggcccagttggtcctcttcccttgtgacagcctgtgtccacttccttttgccgccataaccaccacaaatgtggaggcgtaaagcaacacatttgtcatctttaggttctggtcatcaggagtctaaaatgggagtgcagggctgggtttcttctggaggctcaggaagagaatctgtgtctttgcctttcccagcttctatcccccagggcctctccctccacctctaaagccagcagcggagggcactcacatctccagttctcctgcgtctatctttgttcgttctggtccttttccttttcctttcctttcctgacagagtcttgctccatcacccaggctggagtgcagtggcacaacctccacctcctgggttcaggcaattcttgtgcctcagccacccaagtagctggggctacaggaatgtgccaccacacccgactaatttttgtattttttgaaagagacagggttttgccatgtcgaccaggctggtctcgatgcctgacctcaattgatccacctgccttggcctcccaaagggctggaattacaagcatgagccactgatcttggccttttttttttgtttttgagacaaggtcttgctgtgtcacccaggctggggttcagtggtgtgatcacacctcgttgcagcctccaactcctgggctcaagccatcctcccatcttggcctcctacaggtatgtgccaccaagcccaactaattttttttttgttgttgttgttgagatggagtctccctctgtcacccaggctagagtgtagtggggcgatctcagctcactgcaacctctgcctcctgggttcaagtgattctcctgcctcagcctccctgagtagctgggactacaggtgcgtgccaccacacccagctaattttttttgtatttttaggagaggtgaggtttcaccatgttggccaggatggtcatgaactcttgacctcaggtgatccacctgcctcagcctcccaaagtgctggtattacaggtgtgagccacccagctaatttttaaaatttttgtacaaaatgagatttcactatgttacccaggctgctctcacctggccctcaagtgatcttcccacctcccaaagtgctgagattacaaggcgtgagccactgcacctggcctctcctgcatccccacatcgggaccctggtgattacattggggccatccagataatccaggacagtctcccccatctcaagacccttaacttcatcacatctaaaaattcccttttgtcatgtaagatcacatattcatggtgtctagggtttaggatgcagacatctttgagtgccattattgagtctaacgcagcccattatggtggtccttaaggttcccctttccagggaagtcaccccaaatgtcaggacaagagggtttcaggatctccagcctcggctctctggcctcctgcccctgccctgcccagcagcgtcattcagcctcttctggggctcctcttacctcaagggcgaaggcctgaattggcaaaccctcagcactcactgcacaggcaccaggccaggccagcacagtgaacgagtgtcgtggagggaagtcacaggagcagtgaggatgcagagcagaggtacagcctgggcaaggggcagagagccccagaaaaagtgaaagggtacctcactcctgcataccccactgccccagcatgcacctcctggcccctgcacacaccatctgacacccaactgcctctaaatgcatctccagggccctgcacacacctgcccacaccccaccaccccagcatgcccctgcaggcacctcctgggccctgcacacacctgcccgcaccccaccaccccagcgtgcccctgcaggcaccttcagggcgctgcacacacctgcccacaccccaccaccccagcatgcccctgcaggcacctccagggccctgcacacacctgactgcaccccaccaccccagtgtgcccctgcaggcacctccagggccctgcacacacctgcccataccccaccaccgcaacatgcctggaccctgtacatacctgcctgcatcccaccaccacagtgtgccccggcaggcacctttggggtgttgcacacaccatctcccacccagcgtccaccacaggccccacctcccctctacatctgcatagtcaggtttggggcccacagatgctctgacataggtatatccagttcagcttctccagccacctgagtctttggggcaacctcttcatcgtagtgaaatctccacccaccttccctccccaaacccgcttctttgtctatggcggtggatgtatagcatcacatccccagagggtaatggagcatttgggtttaatggacagtgcaaagtgaatatccacaaggccacacagataggaatcaatgactgaaaaaataaatgggggaggagagacagccgtccctgtggaataattccaagtcctatccatcgatgctcccctttccgggaggtggagcttaacccatccccatcccatcagactgggctgcttccaaagagtagagtagggaatggggaatacccacttgacagaggcccctggctgaacccaccttacccaagaggtccaggtgcaggtcacctgggggaagttgccctcctatgcccctggaactggctgttcctttaggttaagcaaagtcttgagtaagggcacatgggcagggcaaggtggttcacacccataatcccagctactggggaggtgaggtaaggcaggaggatcacttgagcccaggagttccagatcagcctgggcaacatagcgagaccccatctcaaaaaaaaaaaaaaaaaggtgggggtacatggtcctctagagtgcttgatgaaatgatgttgagactcacctcagtggctgtgggctgcctaggggccaggctccatggagaaggacccggttgtggctttcggatcctgcactggggcctgagttccctctgtccttggacttggccaaacttccctgagtttcatctgcagagtagggaaacagcacctcaccatgaggggtaaagaggaactacggtgcccccagtcattagcggcagtgattgtcaccattgtcttcagcccagctaggccccaccagccagtggctgtggcctcaggcaagcactcagactgcctcagcttccccagctgtgaagctgaactgagactcctcagttaaggctgggaggattccagagcacaggggcaaagggatctctgaacaatagccacattttttcttttttttttttttggagaaggagtctcgttctgtcacccacgctggagtgcagtgccgcgatctcagcccactgcaacctctgcttccgaggttcaagctcttctcctgcctcagcctcccgagtagctgggattacaggtgctcaccacatgcccagctaatttttgtatttttagtagaaatgggctttcgccattttgctcaggctggtcttgaacttcaggtgaggccggccttggcctcccaaagtgttaggattacaggtgtgagccaccacacccggccaatagccactattgtgttgtatgggtgcctgtgtcttcaccccattctcacccccacatgcagaggcagaaacaggccctggaggaaggaaggcctttgcctgagcatggccccagacaccctgaggggaggggagaggggagagaggagaggaggcaagaggagaggaggggagaggggaggggagggggccagccagggtcagggtgcactctgctgagaagggcaatgggttccctgaaaaccagggctgccagcgcccttccctgcccctcaacactgagcccctgggtgtagccacgctggcttagagtcaccctccacagtacgccttgggaccatgtgccgtggaggacctggaccaagaggagtcagatcacccggccagtccttctatagccacagacacccaacgtgtgtttcctggacttggcatgccccagaagctgctggttttctccaggctttctttgttttagcactttatgagagagagtctcgctctgtcacacaggctggagtgcagtggcatgatcactgcaacctctgcctcccaggttcaagcgtttctcctgcctcagcctcctgagtagctaggactacaggtgagcaccaccatacctggctaacttttgtatttttagtagagacagggtttcaccatgttgcccaggctggtctcgaactcctgacctcaggtgatccacctgcctcggcatcccaaagtgctgggattacaggcatgagccactgcacccagtccagagaaattattaagtttcctgtggggagatgctcagaggccacgcaaacaccctatttctcatcctgttttcacccactcattgtagcatctgcccatggttttgttttatttaaggctagtccattttttttgaaataacattttaaaattgtttatatttaacgtatacaacatgttgtgtggttttggggggttttgctttttttgttttgtttcgttttgagacatagtcttgctctctcacccaggctggagtgcagtggtgcgatctcagctcactgtaacctcaacttcttggtttcagatgatcctcctgcctcagcctcctgagtagctgggactacaggtacatgccaccacacctggctaatttttgtattttttgtagagatggggcttttccatgttgcccaggttggacaatgtgatgttctgatatatttactttgatatacatatatagtgaagtgattactgcagtcaaacaaactacaaactaatataaaaatcatcccatatagttaccatgtgtgtgggggggtgcgctgggtggggagggtgaggttaccagtaattgatacaatgttattaactatagtcctcatgctgtccattagatctctagcatacttgccttccgtaactgtaactctgttccatttgacctacaatcttcccatttccccctgctcctggtaactgccattttactctatttctatgtatttgattttttttttctaattccacatataaatgagatcatgcagcatctgtctttctgtgcctggtttattcggttattcatgtatcttctaagttcatctgaattgtcacagatgtcaggatctctttttggtgtgtgtttgtgacagagtctcgctctgtcgcccaggctggagtgcagtggcacgatctcagctcacagcaacctccacctcccaggttcaagcgattctcctgcctcggcctcccgagtagctgggattatagatgcacaccaccacacccagctgatttttgtatttttagtagagacggggtttcaccatgttggccaggctggtcttgaactcctgacctcaaatgatccacccacttcggcctcccaaagtgctgggattacaggtgtgagccaccgtgcccagctgtccccatggttcttgatggcaacaattaatactagcctttgcctaatggtgttttctatttccatcattccatctgcatttattaattgaaattcaactgtaaggaagtgctgtctcttctcccccatttattgagctacttggaaaaacaaagaccatccaaatgagagcagcacaggctgcttattcagagtttgcaagggagtcagccgaagctccagggcaggcaggggagagggagagctgtggagtggaaaagggcaggctcaagtgagcccacaggaggctgttggcctggggaagctgggggcagccagctaacagcaggtgtcctgtggggttgcttagggaagcacaattggctttctctggttggtcctaagttggaaggggggccagtgttagagaagctgcaatcactgaccaggtcctgagcattgctgcagaggttggtggttggtttccggagctggttgctgcacaggttttgggccacagttttgttgccatgtatggattggccattgtcctgcacctcttctgcctcttaccaggagtttctaaggaacggttccagaccccaccccagccctgcatataaatctgatcttcaatttttttttttttttttttttgagacaaagtctcactctgtcacccaggctggagcgtagtggtgtgatcacggctcactgcaagctccgccttccgggttcacaccattctcctgcctcagcctcctgagtagctgggactacaggtgcccgccaccacgcctggctaatttttttgtatttttagtagagacggggtttcaacgtgttagccaggatggactcgatctcctgacctcgtgatctgcctgcgtcggcctcccaaagtgctgggattacaggtgtgagccaccgcgcctggcccgagacggagtttcactctggtcacccaggctgaagtgcaatggcgcaatctcagctcaccgcaacctccgcctcctgggttcaagcaattctcctgcctcagcctcctcagtagctgggattataggcatgtgctaccacacccgactaattttttttttttttgtattttttagtagagacagggtttcaccatgttagccaagatggtcttgatctcctgaccttgtgatccccccgctttggcctctcaaagtgcttggattacaggcatgagccactgcgcccggccttttttttttcgttttcttttgttttttgagacagcgtctctttctgacacccaggatggagtgcagcggcacgatcttggctcactgtaacctctgcctcctgggttcaagcgattcttctgcctcggcctctcaagtagctgggactacaggcatgcaccaccacacctggctaatttttgtatttttagtagaaacagtggtttgccatgttgcccaagctgctcttgaactcctggcctcaagcgatctgccctccttggcccaaagtgctgggattacaggcgtgagccactgcgcctggccagtgatcctcaactttgattcaaatgggcacctgttctttctgtacttcctgaaacaaagcgtggtggcaccctttagagagagctcaacttacactctgaatttgacaaatgtgcagttgaactttaaaacagattccagggctgggcgcggggcctcacgcctataatcccagtactttgggaggctgaggcgggcagatcatgaggtcaggagttcaagaccaacctgaccaacatggtgaaaccccatctctagtaaaagtacaaaaaagttagccaggcatggtggtgcgtgcctgtaatcccagctactcaggaggctgaggcaggagaattgcttgaacccgggaggtggaggttgcagtgagctgagatcgcagcagtgcactccagcctgggtgacagagcaagactccatctcaaaaaaaataataataataataataataaattatatatataaaaatcagattccaggcagccaggtgtggtagctcacacctgtaatcccagcactttgggaggccaaggagggtggatcacctgaggtcaggagattgagaccagcctgcccaacatggtgaaaccccgtctctacagaaaaatgcaaaaattagctgcgcatggcagcacacgcctgtaatcccagctacttatgaggccaaggcaggagaatcacttgaacctgggaggcagaggttacagtgagccgagatcacaccattgcactccagcctgggtgacagagcgagactccgtctcaaaaaacaaaaacaaaaaacacctctaaactctaacaaatgagctgagaagagtaaggcatttcagcaggaatgtctgttccactgggggtccctggagggagagcaggagtctgccttctgagctttccttgggccctttccaaagattgttttcttaggcaaaaattttgacaagtggccaatctagtgtcctgtcccaccttggcctgcagatcctattttatagaaatcatctttgaacttgtgagtgagttacattttgagaaggccaagtttgggttttgaagcaaaaccagcgtgtctgtcccccaaccccccaaatgatgtctaggagctcccgtgtcagtttcaccccttcttgaaagtcacagccaggtgtctgcttgctcattaaggggcagaggtgccaccccaagtggccgccccatgcagaagaggaaaatatctttttctcactcatcttaggttcatggctgaggcccctgtaacaaaagacagattaacaagataaaagcagacaaatttatttaaaacaagttttacgtgtcttgggagccctttataaggaaacaaagacctccccccaaaacaggtaaacctgcatatgtttatgttaggtttgatgaagattagagtcatgggcaaatctgattagaggacaaaaggatctgatctggctgggcaccgtggcacacacctgtaatcccagcattttgggaggctgaggcgggaggatcacttgagttcaagaccagcctgggtgagaccccgtctcaaaacaacaacaacaacaacaacaacaacaaaaagcttctgatttaatgataataaccttgggggaacttagcaaggcctgtttgttcaggttcttcttggcatctttgcatcttctgttcccctcctccaggtacaggggaggcacctcccacctgagggtctcatgacctgcttctggggagaagggaaaagaaacagtgcttcctgcttctgtgttctcaaaggccaaggtcatattttaggctattatgtcccgaaccccatcccttgttctcactgtggtccccggggtccgggatgtcacatggcttttccctttgccttcctgagctgcagcaaacacggctcactcctgaacacagggagcatctttctgctgtgacaaaagacaaaagcgtgactcttgggcccgtttctgctgaaatcctcagggacctcctcccccagttctgcggtctgtcctacccagttctagaattcacttcatgggtgtcttttctaatttaaattcatgtaaaggtagtttgggctgggcgcggtggctcacgcctgtaatcccagcactttaggaggccaacgagggcagatcacctgaggtaaggagtttgagaccagcctggccaacatggtgaaaccctgtctctactaaaaatacaaaaacttagccgggcatggtggtgcgcgcctataatcccagctaatcgggaggttgaggcaggagaatcgcttgaacccgagaggtggaggttgcagtgagccaagattgcaccactgcactccagcctgggcaacaagcatgaaactctgtctcaaaagtaaaataaaataaataaaaataaataaagggtagtttgtatcactaattaaaaataaattcaatatttctgcaaaataggaggtgatggggaaaaaacaaattaagtacagtggaaacagaagaatgttatggccgggtgcggtggctcccacctggaatcccagcgctttgggaggctgaggcaggaggaccacttgagcccaggagttcaagaccagcctgggcaacataaggagaccctgtctctacagaaaattaaaaacttagccaggtctggtggcatgagcctataatcccagctattcaggaggctgaggtgggaggatcacttgagaccaggaggtcgaggctatagtgagctatgattatgccactgcacccaagcctgggcaacagagcaagaccctgactataaaacagcagcaacaacaaaaagaatgtcatgaaaacctgtgtctctgatggttgcaggcattggtgccctggggccctcttcctcttgagacagggagggtggcgggtgctggtggtgctgggactccctccttggcctcaccaagggatgaggcagctggaacagaagcaggccgctcttgtgctgtgggatcatgcactggctgtggtggcccaccgtgctccaggcctcatcctcaaccctccccactgtgtctgtgtctcctactctgtctcttacaaggacaccagtcattgcacttagggcccaccctaaccctcatctagagatcttgccttaatcacatctgcacagaccctttttcctaaaagcgtcacattcacaggttctgggggcagggtgtatctttcaggggccatcgttccaccccctccagttacgtcccccagccccagctgccctcagtgctctgtcacctgcagggcctagcacacttgtgtagttccagccaggttgtgcagtgactttgtctatgtctgtgggtgccactcgaggctgagccctggccctgggcaggtgatccagtgaaggatggtaccatgggcactgcaggcagccctgtctggtggctcttcttgttcacagaggctgggcaggtgcagccaagggagggtctgaggccacaatgcccttctggggagactgttcctcacaggactgtgacctcctgaggagctcagagcaagagcccacaggagggtgggagggacccccttcggccaggacccaggcctcgggcacctcacccactgttggggtatagcaaatggctgaatcctttctggggaaggtgactttgcagaacatgtccaggccacctgacccagcacctcgattctaggaatcaaggagtagagaggctgcgccgttctcacccaagcgcccaagtgcaaggacagcccccagggtctgtagcggcaggggtggtgctgggcagtagtcagacatggctgattgttgtggggggcggagtgaaacagacgcagtgcatcccatgggctgatgatgaaagatgccgacccccagcaaccggctgggaaaggtctttaggacctggtttctgtctgtttgcaagcagtttagtttatttttattttttgagacccagtcttgctctgtcacctgcgctggagtgtactgctgaaatcacggctcattgaagcctcaacctctttggctcaggtgaccttctcacctcagcctctcgagtacctgggaccacaggtgcatgccatcatatccaactaatttttttctctagagacggggtctcactatgttgcccaggcttgtctcaaactcctgggctcaagcgatcctcctacctcagcctctcaaagtgctgggattccaggtgcgtgccaccacgcccagctgagagcagttttagatttacagaaaaattgcaaaggctgtaccaagttccccgacaccgcacacatctagcgtcccttacgcataacctctcacagtgctgtgctgcatttgcctcactaatgaacaagtgctgagatggtattaatattaatggagctccacactttattcacgttcttccatttttcctgaatgtcctttctctgtccaaggatcccacctgatctttagtcctcacatctccttagactcctctgggctgagacggtttctcaggctctttgtttttggtgaccgttacagttttggggagcagtggtcagggctgctggagaatgcccctccggtgggatgtgtctggtgttttttcctttctttcgagacagagtctcgctgtgtcacccaggctggaatgcagtggcgtgatctcggctcactgcaccctccacctcctgggttcaagtgattcttctgactcagcctcctgagtagctgagattacaggtgcctgccaccatgcctggccaatttttgtatttttagtagagacaggattttgccaggttggccaggctggtcttaaactcctgagctcgtgatctgcccgcctcagcctcccaaagtgctgggattacaggcgtgagccactgcgcccagcctgatgtttttctcacggtcagatggggtgatggatctgggggaggaagaccctagtcgtcacactccatcagaggcacatgcgtccacctgacttatcccagccagcgttgtcctggatcacctagcccagctgggatccatcaggtttctgtgctgcagtcactgacagccccctttccagactgcactctttggaaagaagccgctaagcgcagccacacctgagggcaggaggcatggcccctcttggaggtccgagctgctgtgctatttgggaatcctttgcctgggagatttgtctcttccctaccatgtacttacttactctgtcatttctttatattatatggactcatggttattttatagttcaggctttcatccatgatgctttatgtttttttccatttctactcaaactgttccagctttggccatcaagggttctttcggtgggtgcccatgaccccctcgccacacccatctgctttggtttctgtttctgaacatgccctccatgactggcacctccacgtacgtgctctaggctcttcctttctctctggccccatctttgaagcaggtgtttctcccagagccagtgcccatgggtccatgttcactaggagagtcagcagtggaggctggtgtagcagaatcccaagtgcactttgtacagcgtcactcaccggcactgatgcctgctctggggcctctgcaccctttgcttcactttgcagtaatgcgttttcatttactggatgattttaaagcgtgggaactaaccaggcacggtggccatgcctggaatcccagcattttgggaggctgaggccagaggatcgcttgagcccaggagttccagaccagcctgggcaacatagtgagtcactgtctctacaaaatataaaatgaaaaataaaaattagccaacccagtcggacgcggtggctcatgcttgtaatcccagcactttgggaggccacgttaggaggatcacacgaggccaggaattcaaaaccagcctggccaacatggcaaaaccctagctctactaaaaataaaaaaataaaaaatagctgggtttggtagtaaacgtctgtaatcccaggtacttgagaggctgaggcacaagaattacttgaacctggaaggcggaggctgcagtgaaccgagatcatgccactgcattccagcctgggctacagagggagattctgtcaaagcaaaaacaaaaacaaaaaaaaacacccttagctgaccaagtgggaggatcacttgggctcaggaatttgaggctgcagtgagctatgattgttctactgcacttgagcctgggtgggggaaaaaaaaaaggccaggtgcggtggctcatgcctgtaatcccagcactttgggaggctaaggcaggcagatcacctgaggtcaggagttcgagactagcctggccaacatggtgaaaccccatctctactaaaaataaaaaattagctgggtgtggtagcaggcgcctgtagtcccagctacttgggaggctgaagcacaagaattgcttaaacctaggaggtggaggttgcagtgagccaagatcgtgccactgcactccagcctgggtgacagagtgagactccgtctcaaaaaaataaataaataaaaaataaagtattttggtggacagagaccctcgggtccgagctgacacaagcccactggacgtttggcctgacagtggtattggcaccgagcacctcggtgcccactggatgtttggcctgacagtggtgttggcactgagcacctcggccacgctggccccacaacccgctggtagctgtgtgaccttggctggctgcttaacttctctgagcctgtttgctccctgggcaccagatttggaaaaagaacagactgtttgtgaggattacattccagtaccaacaagaaaggcttttgtaaatgattaagcagtacacacaggaccgtggctgcggaatgcagttgagggcatccctccccacgcagggagccagaaactgggataggaaaaggctggtggaacacccaccatctctcaggatctcgccgtatcttaccacctccccttacccccccaggaccgagtctcctgccattccgagcaggcctggtatgggtaatggtgtgaaggaaggcccggtgcgattgcatgaggatgctgaggctgtcctgtcctcgtccgtctcatcaaaggcaagtaccccggcctcctgggatgggtgttctcctggggccccagcctccccaccccccctcccaggctccctgcctcctcctcccagcctctgcaccccctccaaacaggctcagggattcctctgctgtgctccatgcagcccatcacaaatcaccctgtacctaggatgtgcatgttggtaccccttcctacctgggctgagggtggagtggtggagcctctctgctcccacggccccaaatactccatcatgggatggaggacgccagccaccctctattccaccaaaagccccacttgtgatgtgaatccaaccagcccagccacctggtaagaggccaaaacctaacccagttccagcgtggggtgggaagcctgaggtatcagacatgtcttggagcccccttttctccctcagattttggaacactaaggaattagccaaggccaggcatggtggctcatgcctataatcccagcactttgggatgctgaggtgggaggatcatatgagaccaggagtttgagaccagcctgggcaacatggtgaaaccccgtctctactaaaaatataaaaattagccaggcgtggtggtgcacacctgtaatcccagctacttgggaggctgaggcagttgaatcgcttgaacctggaaggcagaggttgcagtgagccaagattgtgccactgcaccccagcctgagcgacagggtgaaaccctgtctcaaaaacaaaaaaaaagagccaaatgcagagagccaaagggggtgggcatgcttggtctttactctgcatttccaagttcacctcttaagtccacaattccactgaagaaaagatattctctcaaagcaattgggtcagccctgttgttcaccatagaaaccagaacccccactggcccctaagtcctctcagctgaacctgaaacacagaccgacccagccccacgcagaaatcatcgcactcccagggcctgactcaggccgaccgcacaggcagttttcaaagtccatggggtcaaaggctgaggtggcgtcatcttccaggcctcccgacctttccccggattccaggtgacatctcagagcagcaggcgggcgggaggactcattcaccggggtcaccaccaggtgactgaggcacagggcaggcacgtgccttgaagtttagtgaaggtcccaacagagctggaagaacacctggatatggctgttgctctgcatgccggagaggagggggtctgcaacgtggatcccaccacgtggacaagcttgaggcagcggtggctgctgaaccacacgcagaaatgcgccagtgctggtcacttgccgggcatcacacacacatgcccattctcctctgtactggcaggccccaacaacattgctcttggtccgcctggccagccccaaggtgggagggactcactctgcaatgtctcttttctttggttaagaagctgagccttggctgggatggtggctcacacctgtaatccctgcactctgggaggcccaggtgggaggattgcttgaggtcaggagttcgagaccagcctggccaacatggtgaaaccccatctctactaaaaatacaaaaatcggccaggcgtggtggcacgcacctgtaatcccagctccgcatgaggttgaagtgggagaatcgcttgaactcaggaggtggaggtggcagtgagctgagatcacgccactgcactccagcctaggcgacagagtgagaccctgtctcagaaaaaaaaaaaaaatactgagcttcttcccactgtgtttatggccaacatgcatcccatctgggattgcccactttctcttgtcagctgcctggccgacaaatccttctttcgtaggatctccccacgtgatggatcttgaaacttcaacccctcagtgatgcctgctcccagctctttggataataaggtgtttgtgttcattagagaggagctggaagtatcagccagaggcagcagcctccactgagcatgtgaactggccccaacacacgtcctccaggtgccactggtggctacctggagaggtgcagtttatggacgtgtgttcctgatactaagatttggcattggccaggcatggtgactcacaccagagatcccagcactttagcaggccaagacgggaggattgcttgaacccaggagtttgagaacagcctgggtaacatagcaagaccttgtctttgcaaaaaaataaaattagctgggtgtggtggcacacatctgtggtctcagctactgaggaggctgaggtgggaggatcacctgagcccaagaggtcatggctgcagtgagctatgatcatgcacttgcactccagcctggtggcagagtgggatcctatctcagaaaaacaacacagagttggctttgtaacgttaagagccttggctgggcccgctggctctcgcctgtaatcccaacactttgggatgccgagacaggcggatcacctgagcctcaggggttcgagaccagcctgggcaacgtggagaaaccccatctctgctaaaaatacaaaaattagccaggcagggtggcgcgcagctgtaatcccaggtactgggaaggctgaggcaggacaaacaaccacttgaacccaggaggcagaggttgcagtgagccaaaattgcgccaccgcactccagcctggtggacagagcaagactgtctcaaaaaacaaacaaaacgacaaactgataggaggtaaccaccgaatggaggaggtggaagaactctgtctccagcagggtgcagggaggcactctccatggaatattccatttgcacacagaggcccattccagaggggagcagctggtccgactgattcagagaagaaactggcctgaagctggtaaggccttggactgctgctgggaccaccaacaagcgcccgcaattctcaaagctcatggaaccagacgtctgcaacctggctgcatgtcccagaaaaggcagaggtccccaaagacagcttccgagaagctaggagaagatcaaactccatggcgaagtttggcctcagaaacaaaatcgctgtgcaatctgtccctttgaggaagggagggctgggctggtggaggggaccctgggagcactgaggaaaaggaggctgtgttctgtggaaccagactgggggtgcaaggctgctgggtagcccaggacatgtgggagagggtctgagagctggcaccttgctgttgtaaagataggactgggagaccaaagagggcaccctctgcctgagctcagtcgggcagagctgggattcaggccaagtgtgtggacagactcaggcccagccctttaccccgagccacacactgagctgagcaaactccagaggtgggggcaaccatgctcagtctgactccggttgcctgttacacctgagtagtgcgccacatcccttccccatctccagcctccaccatatctatcctgggtttctgcaggagccgcttctaccctggtcacatttttatttttattttttattttttcagacactctgtcaccctgtctggagaatagtggtgcaatcacggctcactgcaaccttggtatcctgggttcaagcgattcttctgcctcagttttctgagtaactaggattacaggcacccaccaccatgcccggctaattttcgtatttttagtagagatggggtttcaccatgttgggcacgctggtctcgaactcctgacctcacgtgatctgcccgcctcggcctcccaaagtgctgagattataggcatgagacacagtgcccagccccactctggtcatattaaaaatagcccatttcggccgggcgcggtgtctcatgcttgtaatcccagcacttcagaaggccgaggcaggcagatcacttgaggccaggaattcgagaccagcctggccaacatggcgaaacctcatttctactaaaaatacaaaaattagccaggcgtggtggtgcttgcctgtaattccagctactcaggaggctgagggaggagaatcgcttgaacccgagaggcaaagtttgcagtgagctgagatcacaccactgtgttccagcctgggcgacagagcaagactgtgcctcagaaaaaaaataaaaataacccatttatttgggcaaagatcagcctccttgccaggctttgtaggatctagcacccacctctctttgccatctcctttctcttctctgggccccctccctttccctgtgccagcaaatctgccctccttgtggtcccccagggtcccctgctccttttcaccctagcctctgagtattcattcctccccacctaatactatgacacacaccccaaagtgacctgcacctcatccttcaagctcagcctctcacctaccaacccagagttcttacagaaccctgggccacctcctcgcggcaccttcccaatgggtggctgtatttgctttcatctgatgcttctgttggcatctggctctctgtgtggaccagtggcaccacggggacaggaagggtcttgtacacacccccaccctgcactgtggggctccaggcccttcaggatgcccttgcctggtgggacttcgcagattcctgggagtcactgaacaacctgcccttccacgttacattcagacagcaaagcattgcaggctgaggcagaagaatgctctcccctgcttctcaatgagtcccatggccgagtccactggggaaatggaatcagagcacctcccatccagaactttccagaatgctctctgccacttctcagtgagagtcccgtggccgagtcagcaggggaaatggaaactccaacctgatgggcaggtggtgcctgtgggatcccacagggctcggacacactgctgtgcggcgtgaccttccagggaaggagggagggctgtgggggagcaggggacttgggcagctccagaggactgcagaaagcgatggctctcaggctggcatgggagcagtcaacgcaggttggcagccatcatcagtgtcactgtcaccccctcaactgggctggatgaagagtcatagatgcctacctctggagtcctgatcggaagttgtgggaagggacacgctgacacagagtcagggtctgcttgcctgatacccactgccaaccccctgaccccaacggtccctggtgcctgttttcagtccctgtgtacctacaatgccacagtgccgtagtcaggtgcacacaggctgtggagggaactgaagtttgcacgtgggccagtcctattgtgagcctgtctctgagaatgtgaaacctgcacacctcacctccaaagtggatggtacctgtcatcttgggaggttttcactgtgtccccagtaggctctgtggcctgtggacccaccacagatcacccagaaccaagcaaggccaacatactcagggtggggtacatccctcggccccggcccagagggtgtaaggaaggcacttctggggcaaggtcctctgcggagccgcccccctgccctctgacctctgatcacatgttctgttgcagcgtgaccacaggcaagtgctcagctccctgctgtctggggccctggctggtgcccttgccaaaacagcggtagctcccctggaccgaaccaaaatcatcttccaaggtaagtgttggccatccccaggtgctagagaagctgccaggcggtcacctcctccttcatggcccccaaaccacgcttcaaattggcttttatttttagatttattttagaaataaggttttttgttgttttttttttttgagacggagtctcgctctgtcacccaggctggagtgcggtggtgcaatcttggctcaccgcaagctctgcctcccgggttcacgccattctcctgcctcagcctcccgagtagctggtactacaggcatgcgccaccatgcccggccaatttttttgtatttttagtagagacagggtttcactatgttagacaggatggtcttgatctcctgacctcgtaatccgcccgcctcggcctcccaaagtgctgggattacagacttgagccaccgcccccggccagaaatgaggtttttctctgttgcccaggctggcttcaaagtcctgggctcaagtgatcctcctgcctaagcctcccaagtagctgggactatgggtgtgctccactgcactcaattgggtttttttaatgcctctttaaaatccactcagaggccctggcgcagtggctcttgcctgtaatcccagcattttgggaggccaaggcaggcagatcacttgaggtcaggagtttgagagcagcctagccaacatggtgaaaccccgcctctactaaaaatacaaaaattagctggacatggtggcgggcacctgcaatcccagctactctggaggctgagtcaggagaatcgcttgaacctgggaggcggaggttgcagtcagccaaggtcgcgccatcgcactccagcctgggtgacagagagactctgtctcaaaaataaataaataaataaataaataaataaataaataataaaatccacttcgaatctgtacgagtttcctggggctgctgtcagaaagcaccacaaaccaggtggcctcaaacaacaggaatttcttctttcacagtcctagggccagaagtctgaagtgaaggtgtgggcagggctgcgttccctccagaggctctaggggaggatccttccttgcttcttccggcttctgggggctcctggttctccttggcttgtggccgcatggctccaatttctgcctctgtcatcacgtggccttctcccctgtgtgtctgttttctctctctctcttttatttatttatttttgtttgtttgtttgtttttgagatagagcctagctctgtcacccaggctggagttcagtggtgtgatcttggctcagtgcaacctccatctccccagttcaagcaattttcctgccttagcctcccgagtagctgggacaacaggcacgcaccaccacgcctggctaatttttttgtatttttagtagagacaggtttcgacacgttggccccgctggtcttgaattcctagcctcaagtgatccacccgccttggcctcccaaagtgctgggattatgggcatgagtcaccgcgcccggcctgttttctcttcttataaggacaccaattcgcatttagggcccaccctaacccagtatgaccttaccttaactctattacatctgcaaaggccctgctttcagataaggtcaccttcttggagactaggggttagaactcagacatagcttttcagaggacagaaattaaaccctcaacagaaaccctcgccctccctcgctagggttagtcacagggtcctctgaagaggtggcctttgcccccttcaaacagttaccagttcctgcctagggcccagaagcaagatggttacggcccgggccctctgcccctcagctgtttgggaagaatctgcaggcttgagccaggcccttcccaccaccttgagccgatcccctaccctctctgtgtcccagtttcctcctccgtaaagtggaggcatggatatccgcttcctccttggctggcatgggcatccagtgagctggcaggccttcgaaagggacagccttatttatttatttatttatttatttatttatttatttagagacagagtctctctctgtccccctggctggagtgcagtggtgcgatctcggctcaccacaacctccacctcctggatttaagcgatactcctgccttaccctcccgagtagctgggattgcaggagtctgccaccatgcctggctaatttttttgtacttttttttagtagagtcagcgtttcaccatgttggccaggctggtctcgaactcctgacctcaggtgatccacccgcctcagcctcccagagtgctgggattacaggtttgagccactgcacctggccagggcaggcccctttaagtgcgcatgagcaggtgcagggtgttgtgttctgcagggaactggggttcaacccttgaggcagcaggcatgcatgcatgttgcacacacaagtggtgggtggtgaggggtgagggaggcgggctgccagaccacgtcagaggctcctggtgaccgtttgtggcctgtttttctgggtctctcccaagagtgcttatggcccaccatggctcgggtcccccatgcccaagggcagcacagagccagaaagggaacctggcagccacagggggtgggagaggcaggatagcggtgcctgtgctgggaccctgggaggggcatgtccgggagagagggcagaccccacatgtagacccctgcaggccttgttctgagagagccagggcttctcagctgagacccaagtgcctggaggctgggacaccttccctgcaggggtttgggtgaatggtagtctagtccaggggcagggtgctgagtgtcaacccatctcagacacgttctcctctcaatggagaccctcactattctggggcttgggtgtcagctcagctcccattcctgggacaagattggggggaaaaggagggtgactctgctagtgggtgccaggggtggggccacgcagatgggaggttctgtcctttgcatctcagtggcttttgtgcttttgttttttccagtgtcttcaaaaagattttctgccaaggtgagccactatgtcaccgccccggcctggggacagtcaccactaccctgatgggctggcaggagttaggcaggtggtctgaggagagtctcaggggtggggacaggactacctgtcttcccattcccagctctgcctggacacagcccagcctgggaactgacgggacatcccgagtgtccttccggcagtggggtggggagactcaacagctctaaaacaaccttttcatgtttgatttattgttaaacagagagcaggtgctactttcttaataaaggaaaagataaactgtaaaagctgggatgccaaacaccaacagacatgcccttgggcagggctccgagctgctttgcagcctggttcgctttgcagtccccaagagaacttggtggggtgggaggcccagaaaacatagggaggaaggacggggctggggttgataatgtcagtctggacaaatcggggtggggccctcacatgggggtggggttatgtgctgtgcatggagatggggtcaccccggccccgcctccgcactttgggcgctctgctggtcacagaggcccgcagggagggcaggcagaggcagagggatgttgaccttcccgcttatctccaggaggccttccgggtcctctactacacctacctcaacgagggatttctcagcttgtggcgcgggaactcggccaccatggtgcgcgtggtgccctacgccgccatccagttcagcgcacacgaggagtacaagcgcatcctgggcagctactatggcttccgtggagagtgaggccccgccccgccctgccacagaatcgccccgcccacgcccgcccctctctctttcttctgcacgccccgctccctcctcttcgtgccttgcccctagccctgccttccctcttcccacaacgaaacactgggagactcctcacccaggccctcctgagggaccccctgactctgtcacatgccctattctgtcttcagagctcctctcctttgcccgtttgtctccagacgtttctccacccccacgcataaatcccagaggggcaggttactatgcccccagggccgtagggaaaatacgcatcattaatttatgccagcaggggggaagggaaggcagccatgtaaacctcaaaatgaggcccactccagagaccccatcagcttggccaggaggaagccaaacccgcctcgtgttcctcggtccccacccctgtccccgccccagcagagacgtgcgggtgctccaggctgggcctctgtgcatctgcaaccccctcactgccgtctcgccttctcctcctgccctgttcagagccctgcccccttggcctcgcctcttcgccggcgcactggctggaacgacagccgcttcactgacctaccccctggacctggtcagagcgcggatggccgtaaccccgaaggaaatgtgagtccttacatcggtgatgcgcatcagccccgggggctctgtgtctcgggggctcccaggtcggaatccctctctctatcgggccccaggggtttgcatctgggcctccgtgtccacagggcaggcctgatgtgtcattctgcagctgttccagaaaggcagcaatttgttctcttagcctgggggtcactttctgcttagatcaaaccaagggtcttcattttgaactgggcacagatgcagtaaaaatatgtaagaatacggccgggcacggtggctcacgcctgtaatcccaacactttgggaggccgaggtgggcggatcacttgaggtcaggagtttgagaccagcttgggcaacatggtgaaaccccgtatttactaaaaatacaaaaattagccgggcgtggtgacacgcacctgtactcccagctacctgggaggctgaggcaggagaattgcttgaacccgggaggcggaggttgcagcgagccgagatcgagccactgcactccagtgtgggcaatagagccagactctgtctctcaaaaaaaaaaaaaaaaaaaaaaaaaaagtctgagactagaatgcttaattcaaggaagataccatgatcatgaaaaatgtgtaagaatagaccgggcttgggcccaggtgcggtggcccatgcctgtaatcccagcactttgggaggccaaggcaggaggatcgcttgagcccaggagtttgagaccagcctgggcaacatagcaagaccccatctctacaaaaactgaaatattagcctgatgtgatggcatacgcctgtgatcccagctgctccagaagctgagggaggaggattgcttgagtctcgcagcttgaggctgcagtgagccatgatcacgtcactgcactccagccggtccacagagtgagaccctgtctccaaaaaaaaaaaaacaaaaaaagtgtaagaatagaggccgagcatggtggctcacgcctgtaattccagcactttgagaggctggggtgggtggatcacctgaggtcaggagttcaagaccagcctggtcaacatggcaaactctatttctactaaaaataaaaaattagccaggtctgctggcatgtatctgtaatcccagctacttgggaggctgaagcaggagaatcacttgtacccaggaggcagaggttgcagtgagccaagactgtgacactacactccagcctgggcaacagagggagactgtctcaaaacaaaaacaaagaaacaaaaaaaaagacaagggctgagcacttgcttcccgtggcgaaggtggagtctgggcttacgcatgcatttcccctctaataacaaagcttgagtgatggggttatatgtcttgaagaagaaggaaaacatcaacatccagacacacccaggcccagccggcttcgggaggagccgagagcctctgtggctcctccctgtgcctgggaggcctgagtcccacctgctgggctgctctgtcctggcaggtacagcaacatctttcatgtcttcatccgcatctcgagagaagaggggctgaagactctctaccatggatttatgcccaccgtgctgggggtcattccctacgctggcctgagcttcttcacctatgagacgctcaagagcttgcacagaggtaaggagagctgggagcatgaggaggggacgttcaggaagcattccctggggacagcagctccacctgggtcacatagacctggagaccaggcggagtggggtacgacccctgggtggggcaggctgtagacccacatccaaatcgggagaaaacacactgtgtgcagccgccactgaggaacctggactcactgccttaaatgcctaagtgagaggaactctggctggtgccacggctcgtgcctgtaatcccagtgctttgggaggccgaggtgggcggatcacttgaggtcaggagttgcagaccagcctgggcaacatggcgaaaccccgtctctaccaaagatacaaaaaaattaggcatggtggcacacacctgtggtcccagctactagagaggctgcggtgggaggatcacccaagcctgggaggtcaaggccgcagtgagctgtgatctcactgctgcacaccagcctgggtgtcaaagtgagaccctgtctcaagaaaaaaaaaaaaagtgactctgggaagcccagtgtgtcacctagagcattgatacctcacctcttcacgagcacacacgcaaagcatatgggtaaaacccagatggaaaggaagtactcttgcttgttttggtagttgggagaaaatcaaaaagtacaaagaatgatataatactcatacctgccactgcatgtgaacaggcattcacattttgctacatttgctcccagatattttgttttttttcttttttgtagagatggggtctccctctgttgcccaagttggtctcaaactcctgggctcaagcgatcctcctgccttggcctcccaaagtgctgggattaaaggtgtgagccgctgcactcagcccactcccagacattttttgtcaaagaaataaaatgttaggggtaacgctgagggcccaagtctctctcctgaggcctcttattagaagtgagggttgcacccctcaagactgctttgaaaatacttctgtatgtatttatctgtggcatgaacaaaaccatgtcacctttcacaggtataaaaaatgctccaagtggagtcagctcacccgggagtgcagctcccagctcagctggtttggggtgcatccaccagcatctgtgctctgttccgcctttttagtggctgcacagtgggccttaccttcttggggtgccctttggctgttgccaggttttctgtgatcagccgacatccaggagctcgtctccttgtgtgactgtaaaaccccattttcggtgtttctctctggagtgctttccagccccttgaccccacgttctcaccccacgtgatgccatcagaccccttgtttttgcccacctggtgagcagatcacagtgtctcctgtctggctgtttttttgagacggagtctcactctgccgcccaggctggagtgcagtggaacgatctcagctcactgcaacctccacttcctgggttcaagccattctcctgcctcagcctccctagtagctgggattacaggcgcccaccaccacacctggctaatttttgtgtgtttttggtagagacagggtttctccatgttggccaggctggtctccaattcctgggctcaagtgatccgcctgccttggcctcccaaagtgctgagattacaggcgtgagtcactgcacccagccttggctgttttaaattcctagttctaaatttactattacaaatgtttaaagtacccctactgacctgttgctgctccttcctcctccacacccacacaccccgtttagacccgcaagacagagcagggtgaagttcatggtcacttatgtccactctgtgcaacagctcgcaggggctccccagggagggcgcaggtcggggaccaggcacgggagcacctagaatgttcctttactagacgtggagtagagctgattagatgtgagcagtggctctaggagttggttctatgattctctgtgtttctgccttttaagaaattttatttctcggccgggctcggtggctcatgtctgtaatcccagcactttgggaggccgaggcaggcagatcgcctgaggtcaggagtttgagaccagcctgaccaacatggagaaaccctgtctctactaaaaatacaacattagccaggcgtggtggtgcatgcctgtattcccagctactttggaggctgagacagaattgcttgaacccgggaggcggagggtgcagtgagccgagattgggccattgccctccagcctgggcaacaagagtgaaattacatctccaaaaaaaaaattttttttatttctcgagtttgagtgaaaggagcgacccggaggtgaggcagtggggcgtgtgggtgcgcatgagtgcgaacacacgtgggggtgcaagtgcatgtgtgtatgtgcacgcaggttgctcctaggggtgcaaaggcgcgcgcacgggtgcggggtgcgcgccccctcgcggcgccttcacggccctcccgcccctcgccctgcagagtacagcggccgccggcagccctaccccttcgagcgcatgatcttcggcgcctgcgctggcctcatcgggcagtcggcctcgtacccgctggatgtggtgcggcggcgcatgcagacggccggcgtcacgggctacccgcgcgcctccatcgcccgcacgctgcgcaccatcgtgcgggaggagggcgccgtgcgcggcctctacaaaggcttgagcatgaactgggtcaagggtcccatcgccgtgggcatcagcttcaccaccttcgacctcatgcagatcctgctgcggcacctgcagagctaggggaccctgagctgctctcaggacggtggaccggtgacccctttgtattctgggcccatggaacggtgggggggtgcgcttgattctacttcaggaggcacatggggcgctttatggaacgagcaggtgggcctgaggggcctgggctcagagtccacgtccaaacgcaaagctggcagccctggaagtgcagtgttggggcgatggtgtggggggtcccgcagctcccctcttccttcctctgcagacgctggcgctgtctgccggaggtgttgcccaaaaggccctagtggggcgtggtcagctccacctcctgatcctgtgtgtcctccgacatgctgctgattctagtgacccctgtccccaccaggctcagagccagaccgcgcctggaccttcttgttctgactccacgtgcctgcccggcctccagggtgcgggggcgcctttcttgcaggcggaccctgcccaggatggggccagcctcgtgctcagctttggccacaaatgcagcccctggcccaccccaccctgccggccctgccttctccagtatttcccacatggccacgactcctcagtcactagagcctcctgctgggaacagtgtcccccagagcctcatgtctatcctagaccctgcaagcagctgggtccccaagagtgcatctccccctagagttgcctgcccatgcccacctgctttgtaaccttcccaggagattcatgcttgctctgcacagcagggctcgaggcccaggccatgacacggaactgcctcaggtttgggtcagacctgcatcctggggcatctgctgaaatgtgagcacacaaaccacctcctttggcccagaagccccccaggcctagcatctcagtgccccaaccctctgcccagctgtggtatccagcaggtccttgggtccccacttgagcaggcacttggctgggatatggagcaatttaaagcccacaggggttgttcagtttctatgaaatggagcatggggtgcctgctagcctcaatcccccgaagtgggagcctcatgatagagtatagcttgggggtgggaggtgaggaaaatctgaggtacccaggggaacccccagctaactggtctctcagaggagtcccccagggcccgccagctatcacagggactcagaaacacccatttcctaatgacatggtgagtttcttgatttcttttttttgtttgttttgttttggttttcaacttggctgaccccgggtctatgatctattcacatcgaacccctgactggtctgcctggtgccagggtgagcgtgaccgtgagtgttgctttcgacagctggctcagcacacgctgtgtgaagggatctgagcttgttcatctccagtcgtgacttcatttcccttccttctgtcctcctcctgttcttgccttggacctgcaggtgtgcagaccgctctctctgccttccttgcatgtggccaccagccatccctgatcttgtccccagaggcccaggcagcctgtgatggctgtgaggggctgtcccactgtgtgggtatcccttacccagcacttaaacttggcaggagaggcagggcaaccctcacagggagatgggagggcacccaactcccacaagcatgcaacagcagtaggaattgggggtctgccccaggtgggtgagaccaaatgagtggatttggggccacaggctaggcaggagagacaaggggtaggtgggagggtcccccagtccctgctgaccccagtgtgtctccccggagatggctcctagctgagtgggacccggcaggagttggggacagtgctgtcccccacccctgcacacagccaggccctcaggctctgcggtcactcgcctccctgctggtcactggtcttggtctggagttatattttgatgccatgaagacactgtttatatctaatgtttatatattttaaagatttgtgccaagagagtatatttaataaaaacttaaatgacttcttctcctgctcctggctcttctttggctctgaccgcccccccatcttcccccatgaacccccaaacagggttgaagtgcttttgacacatttgtgataaaagttctgaataaaagtcttgaataaagaagtttttaaatgcaattgttgtttgaattaatacataccacaattttccagaaaacaccagctgtccacaagggtttacagtgaaaagtaggtgaacagttccctctgcagggggcctcctgtgaccattttctcttgtctcctcccacagagattctgtgcatacactcatccctttcaggatatatgtggccacccacaaaggcaggaggggccgtctctgtgcagccagcacagcccaaagtctcatgggcttgaacatggccttccttcccaagagccctgcactctggggctggctgaggcttcaggcctgaacgtcagtcaccatctgcaggggcagccaccagagggtctccagtggcaatcctggctcacttcacctgcagcccattggccagagcaacttggaggacccacccactgccaggccagaagtgggagcctctgcgtgcccagagaggaggggcggctgggccagcacaggcctggtgctcttgttggggtgggagtaggaataagttccactgcgctgaccccccactgctctccaatctgctcacgtgcaacaggatttcttttgagttggtctccgttgtgcacattgttcagcagctgtgcggttttctcctagaggatccccaggatgacatttaccagggtgggtgtggtggctcatgcctgtaatcccagcactttggagactgaggcaggtggcttgcttgagcccaggagtttgagaccagcctaggcaacacagtaagaccccccatctctacaaaaaaatagaaaaattaggccggatgcagtggctcacgcctttaatcccatcactttgggaggccagggcaggtggatcacttgaggtcaggagttcaagaccagcctggccaacatgctgaaacccccatctctattaaaagtacaaaaatcctagctactcaggaggctgaggcaggagaattgcttgaacctgggaggcggaggttgcagtgagccgctgcactccagcctgagtgactgagaagtctccgtctcaaaaaaaaatttttttttaattagccagtcttggaggtgcgtgcctgtagtcccagccactcagaaattcacgcctcccttatgttaccaaaccaggctcgttctgcccagcagtatgccaacagagatgacaggttttgcagcaaagagtttattcacgaggcagccgagtgaggagacaggagaacagatctcaaatccgcctccctgaagatgggattttaggaatatttaagggatagaggagcaaggtggtcagagacgtggggaaaagtggggcagtcggggaaccgtgcgtgcgtagtcaagcttcatggcttttccataggatgtgtgttcacaaaatgacattgttatcatgatctgagggtggagtgtttggccctctaacgtcaaaggtcaccacctaaatatacacaggccaaggtgaaggttcggctctcagcccatttggattggacaagaactgatcctgttcctgaagaacaacttgagcaaccattaccatggtggcccatacatagagatattatctataaggaaactagtgggagtttttttgtttgggtttttttgttttgttttgtttctttgtttttgagacggagtgttgctctttttgcccaggctggagtgcaatggcatgatctcggcttactgcaacctccacctcccgggttcaagcgattctcctgcctcagcctcctaagtagctgggactacaagcgcccgccaccacacccggctaattttttgtatttttagcagagacggggtttaaccatgttggccaggctggtctcaaactcctgacctcaggtgattcactcgccttagcctcccaaagtgctgggattacaggcttgagccaccgtgcccagcctatttttctgtctttcttttcttttttttttttttttttttgagacagggtctcactctattgcccaggctggagtgcagtgacactaccatggctcactgcagcctccaactcctgggctcaagccatcctcccacctcagcccccctaggagctgggactacaggtacatgccaccacgcctggctactttttgtattttttgtagagatggggtctcaccatatttctcaggctggtctctaactcctggctcaagtgatctgcctgtcttggcctcccaaagtgctgggatgacaggcgtgagccaccacacctggcctgggagtttagctatacattgtttagctgagtgacttttaacactatggggtttataatcaactaaaaacaagtgaggtaagttaagattggtaggtctaatcaggtgagccctcagttccccttatggatgggcaattgttaggtattgccatgacaatgtgatagcaatttggtgggggctgctgaactcatctgcaccccgcctctgacatccagcccagatttctgatctaagttccacgtttcacaccagcccctgaaccttggtcaacccctcccctctcccacccaccactgtggcatctcctaacagtatagaggtgagcccgtggacctgtctagactagtgacagtgaagaagatgtttgctagctgcgtccaagaagagcttcaggagtccttttttttttgagacggagtcttgctctgttgcccaggctggagtgcagtggcgcgatctcggctcactgcaagctccacctccaggttcaagtgattctcctgcctcagcctcacaagtagctgggattacagatgcccgccaccacgcccagctaatttttatatttttagtagagacggggtttcaccatgttggccaggctggtcttgaactcccgacctcagatgatctgaacgcttcggcctcccaaagtgctgggattacagatgtgagccaccacacctggccaccaaatgctttttgctataaacaattccgcgcagcctaggagtgtcctgaagaaacacaacatggtaccccaggtgcaaccggcggctgatgactgaaggtaggtgtgtaagtagcttaacccatgcccggacgtgggatcatcctgagataattgctctaccctgccccgctaaggcccacagcaggactgagcctggttgcccacagtgtcacctgctcattggtgccccctgcagggcatcttccctcctcgtctcagctctcacccgccatgggggctgcctggggacacctcccaggtaaaccactagctctgagtccttttggggtcatctttgggggaaacctatccaaaaaggaataggaatgccaggtattcctgcaaatagatcatatagatttataccacatactcacccatatttgatcttccataatctgacaagtaaaaaatggtatctcagccgggtgcggtggctcatgcctttaatctcagcactttgggaggccgaggcagctggatcacttgagctcacgagttcaagaccagcctgtgcagcatggtgaaaccttgtctctacaaaaaataccgggcatggtggcacgtgcctgtaatccccactactcaggaggctgaggtgggaggatggcttgagtctgggaggtggaggttgcagtgagtcgagatggcaccactgcatcccagcatgggtgatagaaccagaccctgtcgcaaaacaacaacaacaacaacaaaaaccagttaatttatggccaggcatggtggctcacacctgtaatcccagttctttggaaagctgaggcaggaggatcacttgagacctggagtttgtctctataaataatttttttttttggtgggacagggttctcattctgtcacccaggctagggtacagtggcacaatcacatctcaccgcagcctcaacctcccagggtcaagtgattctcccacctcagcctcccgagtagctgcgactacaggcgtgggccactatgcctggctaattttttatattttgtagagacggggtcttgctatgtcacccgagctgatgaactcctgggctcaagagatctgcccacctccacttctcaaactgctgggattacaggcgtgagccactgcacccagccctctacaaataattttaaaaactattttactattttaaaagttgaaggttatattttgttttatctatgagttttatttcccctttttattttgtttcggcttgtctggaaatggtatattccgtttcttcacccatagggcttcacaacatcagcactgctgacatttggcgctgataatcctctggggtgaggccatcctgggcaccacacggtgttgagcagcatctctggcctccattcttcagacaccaagagcaacacctccaccccttgtggtgacaactaaaagatgtctccagacatcaacatgtgttcctttggagcagaaccaccccgtcctgtgagaggcacggatatggtggttacaatggatacatcaacaagaatttaaatgtttggccgggcgcggtgggcgcggtggctcaggcctgtaatcccagcacgttgggaggccgaggcaggtgaatcacttgaagccaggagttccagaccagcctggccaacatggtgaaacccatctctattaaaaatacacacacactgccgggtgcggtggctcacgcctgtaatcccagcacgttgggaggccaaggagggcggatcacgaggtcaggagatcgagaccatcctggctaacacggtgaaaccccgtctctactaaaaatacaaaaaattagccgggcgtagtggcgggcgcctgtagtcccagctactcgggaggctgaggcaggagaatggcgtgcacccgggaggcggagcttacagtgagccgagatcgcgccactgcacttcagcctgggcgacagagcgagactccatctcaaaaaaaaaaaaaaaaaaaaaactacacacacacacaaaaattaaaatatttatcttccctctgagccacacacaaagacctcaaccacccccttctatctttcctatttttatttatttatttattttgagacagagtctcgctctgtcacccacgctggagtgcaatggcgcgatcttggctcactgcaacctctgcctctggggttcaagcgattctcctgcctcagcctcctgagtggctgggattacaggcacctgccaccgcacctggctgatttttgtatttttagtagggatggggtttcaccatgttggccagggtggtctcaaactcttgacctcgtgatccaccgcctcggcctcccaaagtgctgggattacagatgtgagccaccatacccagcctgatgaaaattttaaaaaagaaaattcttaaaccgttctaagtcagggaactgtctgtatacatcttacttatacaaaaaggttacatatgcaccttacattgtttttgtttttgttttgagatggagtctcactctgtcacccagactggagtgcaatggcatgatcttggctcactgcaacctctgcctcccgggttcaagcgattctcctgtctcagcctcccgagaggctgggattacaagtgtgcaccaccacgcttggctaattttttttgtattttagtagagacagggtttcaccatgttggccaggctggtcttgaactgctgacctcaggtgattggcctgcctcggtctcccaaagtgttgggttacaggcatgagccacggcacccagcctgcaccttacattgtaacacacgtgtggacacaccctggagtcacagctacaggacaatttcagagtccatgacggccccacatcccttccctgggtcaccaaggcctcaatatgcccctcccccctccctgtgtgtgatatctatacaagtcacctgcatacctgtagcagacgctggcatcactgtgggctccccgccctcccattcctcaaactggttttcctctaaggtttccctgcccatctaaccttctcctggcactccctcatggtgcatttctctcacctgcccgtccgtcccaggccacctgccctctcagctgggactccaacttcccctgatttctggtctcttccatcctgcttttggacttttcctgggacacttgcatttcttctttttctttttttttttttttgagacagagtttcactctgtcacccaggctggagtgtgatgcgatctcggctcactgcagcctccacctctcaggttcaagcgactcttctggctcatccttctcagtagctggaactacatgcatgcgccaccatgcctaatttttgttattttagtaaagactgggtttcaccatgcgttgaccaggctggtctcaaactgctggcctcaagtgatctgcccgccttggcttcccaaagtgctgggatttgggattacgggcgtgagccgccgagcctggcctccttcttgctctcctttctcctcccagacctttgctcccctctcagtcctgctcctctctccctcccgcgcagcccccaccctgcacccgggcaggtgccacagggacgtgcaagacagctaccaccctgcacaagcccgagtcccaaaccactcagaccctgtttgtaaaaatcggcatgctcctttatttgttcagaagagcagccagcatcacccttgccactcaaacctggcacatacgcttcggagacaatggcctcgggaccctcatgctgctgggcccaggagagacagttctgaggcagaaactcggcgtccaaggggggccgcgggtcaggcactgtggtgaagggaacgccggggagtccggccccaccttgcagctggggacacgggggcgcaaacagagggggcaggctagtgtcccgctgccccaggaacagacctcagggccccaggagggtctgcaggcagctaggagcctgccaagtgctggtggaagtagaggccgaaaaggctggcgagcagctggcaggcagccgtccaccagatgaggtaggccaggacgccacggaggaagaggggagtaagcaggccacccagagccccggcaatccgcgctgcagtctgctggacttcgtcctccccagagccgatgggggcagcgctggctgaggatgggtcgggggatagtagaggagctgggcccaggccccaggaatagcctcctaggagaagaggatgaagcgaggtatgagtggaaaaatgggggagggggcgagggacagggctggcacggggggccaggcccattcctccagacactcccacccctgtctcagactccatctccagcccagtctccaccccctcaggcgctgccccctgtccaaggcaaaccctaccccaggccccacctcctgctcagatcctgcctcaatacatgccctgccccctccccaggccccgcctcctgccaagacgcaacccctccccaggctccacctcctaaggcaaacgccatcccaaactccacctcctgctcagaccctgcctcaccacagtccccgccccctacccaggccccgcctcctgctcagattgcacccatccccaggctccacttcctgtccaaggcaagccccactccaggctccgcttcctgctcagaccctgccttaccacagtctccgccccctgcctaggccccgcctctccccccccaccgcggtccccgccagagtccacctccactctgttttatcttccaactccgcccctcctccacccccacaccgcggcatctcacccagcgtcttgagcagaagtgtgcagttgagggtgaggatgagcggcgtcaggtactgcaagctcaccacggtcacatagcagtagactcggaccacctgtgggcaggtagcaggggtggctgcagcaggaggccttctggtttgggacgactccacgcccaaaggaccaggaaccccaccctgagccccaggttccctctggcctaggtcatcggggcgtccataccctctgctggatttcacgggcttcgatgcggccagcctcccttcgcagctgctccacccgggccttggccaggcacaggtaggcctgcaggtggggccgggtcaccgccagccgcagcaggcacagcaccaccagcaaccagaggcgcccagagtcgaaggcagaatcggacagcctgtgcggagagggccgggggcaagggactaagaaggtcgcccccgaccccccaggatcttccccaggctcctccctgaatctcagaggctagggcacccaggggagccccagctacctcctagccccacccaatacgcacagggagaaacgcgtctccccaaacggcggctggtgcaggaagtcccgtgcaatgggctttgtccagagccacaggatgaacaggggagacaggaagctggtgtgcaggaggaacctggggggtgagggcaggagggagtgaggcctgggtaccccctctcctcgagtctctcccttaagctccctagtccccccacccaccaagcgacccacttaactgcagcatgggtctgtcctccgacatggtcagtgcgtcccggtgggtctgggccagccgcaggcctgggaaggtgaggaaggcacccagcacagagcccaccactgccagtcccacgcggatagccagcttggccacaggaagcctaggagaacaccaggtcacgagcctgcctgggggaccctgggagggtcccagcctgcccttgcctccctcccccattcccaggactcacgcccagtcccagccctgcttcttcagaagtggctctaagttctgggtcatgctggccagacctggggacgataagaagaggaccgagtagagtgaattcctagggtctctaaggccactctgttccctaaccccccatccctcaggcatccgtttgcttcccaagtaggaatgaacaagggtctgccaggccctgagccaggcacaaggacaattttgtgctctagttacacagtactttttacaagaaacaagattggagtggtggttcacgcctgtaatcccagcactttgggaggctgaggcaggcggatcatctgagatcaggagtttcagaccagcctggccaatgcagtgaaacccccgtctctactaaaaatacaaaaattagccaggtgtggtggcaggtgcctgtaatcccagctacttgagaggctgaggcaggagaatcgcttgaacatggggagcggaggttgcagtgagctgagaccgcaccattgcactccagccttggggacaagagtgaaactcagtctcaaagaaaacgaaacagaatgcaccaggcagacactcctgattgggctgggaacattcaggggtatctgttgagcctgagctccctaggttatagaaggaatctagagggggatgaaggactcctgcaggagaaaaccaaagtcctcctggaggaaggaatcctcaattcaggacccaagatttttcaaaaattaagagcagggctgggtgcagtggcttgcacctgtaagtctcagcactttgggaggccaaggcgggtggatcgtttgagctcacaagtttgagaccagcctgggcaacatggcaaaacccccatctctacaaaaaatacaaaaccaggggtggtggtgcacgcctatagtcccagctactgtgaaggctgaggtgggaaggatgggttgagcccaggatgtggaagttgcagtgagctgagatcatgccactgcactccagcacagagcaagaccttgtcaaaaaaaaaaaaaaaaaggagcaaattcatatgagctcacaggcaaaatcaccaaatgcataaggaaacaaatcaccataaaggagagttaacagaaaaacaacagtcaagtttaggcctcaaagacttcagaaattggtgctgtcaattatgtgtcaaatgactaaggaaatgaaagctgtaatcacagaacaagtgacatgagaattccttcagatgactgggtagagttgcaaaggaaccaaattaaactcttccaaaggaaaactgtaagtattgaaataataggttgttaaacagcacattaggaacagccaaaggaggaagtgatgaactggaagacagatctgaagaaatcactcagattccaactcagaaaaacaagtaggtgagaaatatgaagagaggctaagagataaggaagacagaacagagagcccaacgcaaatcaaatcagagccccagagggagggaagagaaggaatgaagaataaaaggaattactggaagagaatggttgagaagtttgcagaatgaaagacagacacaaagtatatcaaaccatgtaaataaaaagaaatccatacctagacataatggagtgaaactgcagaacaccaaaaacaaaaaaattacaaagcagccagggagttaagacagatcacctacaaaggaacaacaattaggctgacagccaatgtcaactgcaacaacagaaaaggaacaaatagaaagcaaaaaagtaagatggtagaaacaaagtcaaatatgtcagtaatcacaataaatgtaagtagactaaactttaaagttaaatgacaaagactgtcagactacattgaaaatatccagctacatgttttttaaaggatgacataccttgacataaagtcactggaagactgaaagtaaagggatgttaaaaagatacagcaaatactaatcaaaagaaagcaagctagaaaggctatactactaccagccaaactagactaagaagtagtattagaataggccaggcgcggtggctcacacctgtaatctcagcactttgggaggccaagacgggcagatcacaaagtcaggagttcgagacgagcctggccaacatggtgaaaccctggctctactaaaaatccaaaaaatagctgggcatggtggcgggtaataccagctacttgggaggctgaggcaggagaatcgcttgaacccaggaggtggaggttgcagtgagccgagattgcgccactgcactccagcctggccaacgagagcaaaactctgtctcaaaaaaaaaaaaagtagtattagaagacagaagggttccatacatcatgataaaatggctgattcaccaggaaaatgtaacagttctaaatctgtgaatagaactaatctgtgaattgtgaataggctgcaaaatatataaagaaaacactgacagaattgatagggaaattgagagctctcttgtcccagagggagattaacttctgctgactgataagtcacagacaaaaggttaggcaagatggagatttgaatttattaaactcatagagccagggaatatgtccttcaattagaacatgtgaaaaaaggcaaaacaacaaaaacagaatatgtccttcaagaaaacaaggaatagtcacaaaatgtgatcacattccaggccatagggcaaatcttaccaaattttaaagaaattatttcaaatagaccatctgtgcaattgagctagaaataaatatgtattttttaaagatctatgtttgaaaaatttaaaaatatttaataatccataggtcaaagcatagcaagaccccatctctacagaaatcagaagggaaatgttaaaacaccccaaacagaataataaaaaatatcagtcaaaacttgggtaaactgccaggtgtgatggctcacacctgtaatcccagcactttgagaggccgaggtgggtggatcacctgaggttaggagtttgagaccagcctggccaacatggtaaaaccccgtctctactaaaaatacaaaaattagccaggcgtggtggcgtgcacctgtaatcccagctactcaggaggctgaggcagaagaattgcttgaacccaggaggcagaggttgtagtgagctgagattgcacagttgcactccagcctgggtgacaagagcaaaactccatctcaaaacaaaaacaaaaacaaaaaaaaacttaggtgaacaaaagtgagacctggtaaaatatatatagcattaaatgctatatatgctataaaattagaaaagattgaaaatttatgagccaagtagctaactgagaaattggaaacaagaaaaggaggtacgccagtactgttctcaaatccagaggtcctagccacaccaaaggggaaggatcagacagaacaaaagaaaaccaaaaagaatctgcaattcaataaaaatataattgtttagcaaggttagtccgtggagacactcaaatttgacccctatatgataacacaaaaattaatgtcactgtccatcagcaacagtgagtagtttaggagcttatatgaaatgtaaaagttgaaatattttatttattgatttttaagatggagtcttgctcttgtcgcccaggctagagtgcaatggcgtgatttcggctcactgcaacctctgcctccggggttcaagtgattctcctgcctcagcctcccgagtagctgggattacaggtgcatgccaccttgcccagctttttttttttttttttttttagacggagtctcgctctgttgcccaggctggagtgcagtggcgcgatcttggctcactgcaagctccacctcccgggttcacgccattctcctgcctcagcctccccagtagctgggactacaggcgcctgccaccacgcctggctaattttttgtatttttagtagagacggggtttcacggtgttagccaggatggtctcgatctgccgacctcgtgatgtgcccatctcggcctcccaaagtgctgggattacaggcatgagccaccacccctggccagtcattctatattttcttctaaaatatttcagccaggcgtggtggcaagcgcctgtaatcccagcactttgggaggctgaggcaggtggattgcctgaggtctggagttcaagaccagcctggtcaacgtggtgaaaccccatctctagtaaaaaatacaaaaagtaggccgggcacggtggctcgcgcctgtaatcccagcactttgggaggctgaggcgggtggattgcctgaggtctggagttcaagaccagcctggtcagcatagtgaaaccccatctctagtaaaaaatactagagatcgcccactgcactccagcctgggggaaagagcgagactctgtctcaaaaaaaaaaaaaaagacaatgtagaatgactttctgattttagggaaggatatttttcaagacaaatatcaactaaaataatcaacttccattcatcaagacactagaggtgacacttacaactacatttgacgactcagcaaagaaagtgtgatgcatgtatgcagacggaaaataatgcaaatagtggtcaaatgaaaacaaaagaagtattggcaatgaagtggataaatttggaacacttgtgcactgctgctgggaatataaaatataaaatgggctgagcacagtggtgcacacctgtaatcccagcactttggaaggccgaggctggcgattgcttgagttcaagagttcaagactagcctgggcaacatggcaaaatctgtctctattaaaaacacaaaaattatctgggtgtagccagatgtggtggctcacacctgtaatctcagcactttgggaggccaagatgggcaggatcacctgaggtcaggagttaaagaccagcctggccaacatggcaaaaccccatctctactaaaaatgcaaaaattagccaggtgtggtggcgcacacctgtaatcccagctacttgggaggctgaggcaagagaatcacttgagcctggaaggtggaggttgcagtgagccaagatcatgccactgtactctagcctgggtgacagagggagactgtctcaaaaaataaaaataaaaataaaaaaataaattagctgggtgtggtggtgggagcctgtagtcccagctacttgggagcctgaggcatgagaatcacttgaatccgggaggcaaaggttgcagtgagtggagatcacgccaccactgcactccagccagggcaacagaatgagactctgtctcaaaaataaaataaaatggttcagctgctgtataaaacagtatggcagtccctcaaaaaattaaaagtagaattatcatataatccagcagttccacttctggatatatactctccaaaactgaaaatggggtctcaaagagatacctgtacactcaggttcacagcggtattagtcaaaaagccaaaagttgggaacaacccaagcattcatctgtggatgaataaacaaaatgtgttccacccagacaatgaaatagtgttcagtctttttttttttttttttttttgagatggagtcttgctctttcacccaggccggagtgcagtggcactatctaagctcactgcaagcgccgcctcctgggttcacaccattctcctccctcagcctcccgagtagctgggactacaggtacccgccaccacacccggctaattttttgtattttttttagtagagacggagtttcaccatgttagccaggatggtctcgatctcctgacctcgtgatccgcccgccttggcctcccaaaatgctgggattacaggcgtgagccaccgtgcctggcagtgttcagtcttaaaaatggaattctggctgggcccagtggctcacgcctgtcatcccagcacgttgggaggcggaggtgagaggactgctcgaggccaggagtttgagaccagcctgagaagcatagcaagaccccatctctacagaaaaaaaaaaaaaaattaaaaattagccaggtgtggtggcatgtgcctgtggtcccagctacttggaaggctgaggtgggaggatcacttgagccctggagatcaaggctgcagtgagttgtgattgcaccactgcactccagcctcggtgacagagtgagatcctgtctcaaaaaaagaaaaaaaaattctaacacctgctacaacatggatatgccttgaggacattgtgctaactgaaatgagcacgtcacaaaaggacaaatactgtatgatgccacttatatgaggaacccagagtggtcacattcacagagacaggacgtaaaatggtgggtgtcaggggctgcaagaaggaggaacagggagttagtgtttgatgggctggagtttcagttttgcaagagcaaagagttgtggagatggacggtggtgatggttgcacgacatctaaatagactttttttttttttttttttttgagatggactcttgctctgtcgcccaggctggagtgcagtggcgcgatctcagctcactgcaagctccgcctaccaggttcacgccattctcctgcctcagcctcccaagtagctgggactataggcgtgtgccattagcctagctaattttttgtatttttagtagagacagggtttcaccatgttagccaggatggtcttgatctcctgaccttgtgatccgcctgccttggcctcccaaagtgctgggattacacatgtgagccaccacacctggcctacattttttttttttttttttttttgagacggagtttcactcttgttgctcaggctggagcacaatggctcgatcttggctcaccacaacctccgcttcctgggttcaagcaattctcctgcctcagccatccaagtagctgggattacaggcatgtgtcaccacgcccgactaattttgtatttttagtagagacagggtttctccatgttgatcaggctggtcttgaactcccgacctcaggtgatctgcttgcctgagcctcccaaagtgctgggattacaggcatgagccaccatgctcggccatctaaatatacttaatgccactgagctgcacatttaaaaatggttaagatggtgaattttatgttttgtctattttaccacaatgaaaaaaaattcaaagagaaaaaagattcaaagatgggcaacaatgtgaacaggtatttcacaaaaatttcacagaagagacatgaatcatgaataaacaggaaaaggtgctcaacttccctggtaatcagagacatgcatgttaaggccacagagggcatcattccatgtgacgagggctaggttggcaaaaatcaagccctatccatggatcttgattcatttaaaccttactgccgcccccttgggagattggtgcagtcactaccccacctacttattatttgaggggtaggtttgcaggtactcatatgattattttgctttataattgacatacacatcttctttgtatatatcaaacatatataattttaaaaactgaaaggcagggagaattggagaaggtaaaactcaagcagtcagcagggtcatgtgggccatggtgagggctatggtctttctcctaagaccgggggagtgtggtgccgggcagagaagtgatgaggtccaaattatatgttaaaaggatcatttaagaggccaggcacggtggctcacacctgtaataacaacaatttgggaggctgaggcgggcagactgcttgagctcaggagtgtgagaccagcctgggcaacatagtgagaccctgtttcaataaaaataaataaataaataattttttaaaaaaatgaaaaaagaggccacacacagtggctcatacctgtaatcccagcacttggggaggctgaggtgggtggatcacctgaggtcaggagtttgagaccagcctggccaacatggtgaaaccccatctttactaaaaatacaaaaattagccaggcgtggtggtgcacacccataatcccagcttgggaggctgaggcaggagaatcacttgaatgcaggaggcagaggttgcagtgagccaagatcatgccactgaactcctgcctgggtgacaaaagtgaaactccatctcaaaaaaaaaagaaaaaaaaagagctatagccatgagtgtccatcagagacagtgagagaggcaatgtcctgtcttccccaaagcccaacaaggttcaggagctgagatggtcactaatggggactgccttcaccccaggagcccactcctttgcctactcgtgctggacacggagccagttaaaccatcttggtcagattacatgagggagtgacagctgcggtggccccacgttgggggctgcacttaccaggctccaggcccagctcgagggtctcctcccgcaccacttgcaccagcatggccagcagcaggaagaggaaggcaaaggtgaggcagacagagcgctcacccccctcctcggcgctgaagtacagccgtgtcactgtcaggaacatcttgctggaggctggagctaaggaggcctcaggtgccactgccccactctgcccatttcaccacactccgtctgggaccccagaactccagggaacaagcactgctgcacaaataggccttggggatgacctagaggagttcggttttggggtgctggatctcagatcaggatgtgggctgggggttcccgttgagtgggagatggcctcatcaggccaccgtgtctgtacagcctcccgccctgggtgaccctgcctctttcacccacctcacctacttcacatcccttggaaaagcaatcagatatagaagggcttcatctccaatctgctgtcaaaatgcagcatgggggccagacacagtggctcatgcctgtaatcccagcactttgggaggccaaggcaggaggatcacttgagcccaggagttcaagagcagcctgggtaacatagtgagacccccatctctacaaaaaataattttgtggtagcccctgtggtcccagctactggggagcctgaggtgggaggatcgcttgagcccaggagtttgaagctgcagtgagccctgattgcaccactgcactccagcctgcacgacagagggatatcttgtctcaaacaacaacaacaggccaggcgcagtggctcatgcctgtaatcccagcactttgggaggctgagacaggtagatcacctgaggtcaggagtttgagaccagccctgaccaacatggtgaaacccagtctctactaaaaatacaaaaattagtcaggcatggtggcgcatgcctgtaatcccagctacttgggaggctgaggcaggagaatcacttgaacccgggagacagaggttgtagtgagcctaaatcatgccactgcactccagcctgggcaacaagagtaaaactccatctcaaaaaacaaaacaaaacaaaaaacaaaaaagcatgggaatctggggaaccagtggattttaagacaggtttcccactccaaaagtcacaggagtagcattctttctgtgcttcctcagacttgggtccccaaagtcatgtatttgctctctttgggaggccaaggcaggagaatcacttgaagccaatcaggaccagcctaggcaacaaagcaagatcctgtctcaacaacaacaacaaatatatatacatgtacatacatacacacacacacatatatatatatatacacacacacacacacacacacacaattttttggggggatgtagtttcgctcttgtcacccaggctggagtgcaatagcatgatcttggctcactgcaacctccacctcccgggttcaagcaattctcctgcctcaggctcctgagtagctgggattacaggtatgcaccaccacccccggctaatttttgtacttttagtagagaaggggtttctcaatgttggtcaggctggtcttgaactcctgacctcagatgatccacctgcctcggcctcccaaagtgctgggattacaggcatgagccaccgcgcctggctaatttttgtatttttagtagagacggggtttcaccatgttggccaggctggtcttgaactccagacctcaggtgatccgcctgcctcagcttcccaaagtgctgggattacaagcatgagccaccatgcctggagtatatattttttaaaattttgccaagggaccatatctttcttggccctgattgtggactggcctggtgatttccttaaacaaggagaatgtggtagaaagaatagggatggggtgggtgactttgggcaaggcattccctcctgcctcctggcatttctactgccaccaaagggcatgaccatgtggagtggagatgaaccgacctgctgagcccagcccagtctgtccacccacagagctggagcacataaaatgtctgcttcatgtcactaagcttggggaagtttgtggcacagcaggtgaaaactgccacaccagtttaggggagccagggaagctcaggtcctgctcccacccgccccactggcagggagcagagaggaaggatacatggagaaggtcaccgtgagcaggcaccagaacacagcaatgttagtctccttggctggtcccagcatgtagtagtaggcctctgtgaagaggtacacgccgcccgagtacacagcaaagtccacaaaccactggtactccaggaagaagcgcaggactgtggggggcactctgctcagccctggggcccagctcgctcccctcctaatagaacattcttccttcaaatcctccccacccccatgagggtgtggagaccttcagggctgagggagtagagtttagggatgggactgggctattacccagggcatccacggtcgtgagggggcaggtctccagctggaacggggcatctcggggcacagacagtggcttctcctcactaaggccattggcccacctgggaggatggtgacaagcaagagggacggtgagcacgcattccactgaggccagccaccctcagagctcagagcagctggcctggagaccatctctttccacaaccttggctcctctgcacactgggatatggggatccccccacccacccacaggactggctagagcaaactgccaggaaacagatgctaacttgacagtgaccatctccttggactagggtctcccggttcacctgtgcccagatcagcgcctggaagtatgggtgggccggtcctgtgtccctgagcccagagccccctgagcaggggtgaggccgttcctggggaggagccaccctcccaaggctggggctggggcccaggtcactcaccgctctttcctgcctctgggcctcggcttccccgccagggcccgaagctcctcctcagacgggtgcttgtatcggaacaaactgagagcaaggacgggcagtcagggaagctcaggcgtggggttgggaggttgaggcagtgaaccccaaatccagggattctagttagagggtagcctaggccaggggaacactgggaggtaggtgagggtacagcatggggaaattctggggaaatcgtgagaccaacagatctaggctgagtgggctccgggggcttggatacccctgaatctgctggctaactctcctggggaagccagtgtgtgcaacttttcttttctttttcattttctttttgagacagagtctccctctgtcacccagactggagtgcagtggcatgatcttggctcactgcaacctccacttccccggttcaagtgattctcctgcctcagcctcccgaggagctgggactacaggcatgcgccaccatgcccagctaatttttgtatttttaccagagacagggtttcactatgttggccaggctggtctcaaactcctgacctcaagtgatccacccgccccggcctcccaaagggctgggattacaggtgtgagccacctcgcccggcctttgttttttgtttttgagagaaggccttggtctgtcgcccaggctggagtacagtggcaccatctcagctcactgcagatttgactttctgggctcaaacgatcctcctgcctcagactcctgattagctgggatcacaggcgtgagccaccatacctggctaatttttaaaatattttgtagagacagggtcttgccatgttgcccaggctggtcaagtgatcctcccaccttggcttcccccagtgttgggattatgggcctgagctatcatctctgacgtgttttttttttttgcctttgtttttgtcacatacatttttctcaggagagaattcagttgccaccagattctcagaaagcatcacagacccacgcaaggacaaaaaccagagcaggcgagctctagcagatgcaggggtggaaggaaggctgggttacagggaggcaggaagagtgagggacgtggggagtgtggtgatggttccacacatgtgtacacctgtcaaaactagtccaactgtgtacttcaaatatatacagtttgtgtcaggcatgggaactcacgcctgtaatcccagcactttgggaggccaaagtggtaggatcgcttgagcctaggagtttgagaccagcctgggcaacttagcaagaccccatctctattaaaaatttaaaaattgtctgggcatggtggcgcacacctgtagtcccagctactcaggagattgaggcaggagggtcacttgagcccaggaggttgaggttgcagtgagctatgatcaggtcactgcactccagactgggtaacagagtgagaccctgtctctaaaaagaaaaagaaaaaacaaatatatgcagtttgttgtacttcaattacacctcaacaacgtttttccccccaccacccaccaaccaaaatcaaggctttgcaatttgtgaggcggggcgtggggagccagaagggggcgtgactccgcgggcccctcccaccgccggggcggggctcacctgccgttacagagcagccagcgcgcgaaggagcagtgtggcgccagcctgtgcatgagggtggcagtgagcagggtcaccaccagctgtactccgaggaccgcctggggggaggggacatgactggcagcacctgccagagggtcacaagttccctccctccctaggaacccaggctatttatagagaagtcaggctggatgggggaagggcgagcctcttaggctctagcggcttcttaggggagagtcctggggtgagtctggactcacctagcatggccctgccctcccacgtcagagatcaacacccaccctcaccacctagcgggagtgtagggcagtggagaccatgggatttgcctcccgcctccgctatggattcaggtataatattaatttcccggagtctcagttttctcatctggaaatgggtgcttcctatgtagtctcctgtattcctcaccaccaccttccagcccctaaccacgagcccgccacactcagtgaaagcggctcccaccgccttctgcaccccacactgtcacctagggagccactgcgtctcggttgagcttctagctttctccttcacctggtagctccttcccctaagtgtctcccaccttaagtgatccctgatggttccatcaccctcctccctcttcttccctttgtaattaacctccttgaaagggcgtctatgctcctggccacctcctgttttggtgtgaagacctacatgtctgagtggggtgagcttatttatttttatttatttatttatttttttggcaagggagtggtggggagaacagggtcttgctctgtcacccaggctggagtgcagtggcatgctggggtgctcactgcagcctcaacctcccaggctcaagtgattctcccacatcagcctccctagtagctgggattacaggcactcgccaccatacccaactaatttttgtctattttgtagagacagggtttctccatgttgccaggctggtcttgaactcctaggctcaagcaatcctcctgccttggcctcccaaacggttgggattacaggcgtgagccactgtgtccggcctatttttatttttatttttagagatggggtcttgctatgttgtccaggctggtctcaaactcctgggctcaagtgatcctcccacctcaacctaccgagtagttaggactacagtcatgtgccaacacacccagctaaggctttttttttttttaattaggaattttctcacccagttcttaattcagaacacattttcatatacttatttttaaacgttttagaagaatcagtctgtggtgaagctgggttttcctgcttgaatgcagtaaatacccatttgctgccagtaattacataattatgtaaaattatgtgctcaggagagctgtctactagtgttctggaattatcatcaaaatgaaataaagtttatttaatagtaaaattaattatgaaaataatcctttaatcaggcataaataagctaaatttagtcggaaaaaccctaatgtgatgggtaccgggcctagcacggtaattcaaaatgactgctgaggccaggtgcggtggctcgtgcctgtaatcccagcatgttgggaggctgaggcgggctgatcacttgaggtcaggagtttgagacgagcctggccaacatgatgaaaccttgtctctactaaaaatacaaaaattagccagacatggtggtgggcgcctgtaatcccagctacttgggaggctgaggcagcagaattgcttgaacctgggaggcagaggttgcagtgagccgagattgtgccactgcactccagcctgggcaacagagtgggactctgtctcaaaacaaaataataataataataaaataaaaatacataaaataacagactaataggacattttctctgtacctgtgacttgtaaactgagaccagaaatcttttttcagtaatgaggttggtggcggcatctttctcatctctaagtcctcattgctcgccctccccgggaccctagtgcagactggctggctggcacttagggaccatgagtgccagcccatgggcccctgcaagccagtgggtcagggctgttgaagccccacccttcccctaggaccctgccctcccaccccccagtctgtttttctcctctctctccgacctctctcctgtgacctgccagggttttaaccacccaatcagccagcccatcaaaacctcagcacggtgacacctccagcccagacctctctgctgagctcaaccagtagcctcctccaggctctcctgggagaccctagcactcacccatcatcccatacccttccaggtggttcaggcccttcccagtctcacagtcagcccccaacttggttctgcaccctgcaggcatagctagagaccatccctccacctccccacagctcagctctctcctcagccctccctgcacccaaccactggagtctcagaggtcttcctggacctttgggctcttcatcaatgaccccaccaccccccaaaaccccccaagggaaaaggtggtggaggggtgcatctctccacctaaggctcccagaggtctgtccagggatgttctgatggccctgccctccacccagcctcctgtctcagggtcagggctctgcagacatctgcaagaattttctggagtcttccatcagctccttcttttcccttcactggatttacgattctcgaactcaagaaccctgataaaatcaatgcagcctccctcctcattcccgggagcctgtgccttcatctcctacggcgtcctgcacctccgcctgggacgacgccccactttcaataattccggccatcagtgcccttccttcagggccatctccagcgcccctcctcggggatggtcccaggcagagaccctccagttccacgtccctctctctgcccaggccggtcccgtcagggttgtgggagtcccccatctccctgcaccagcctgacccccaggggctgggctaagttttaagaacacactcaataggttggacccagagccgcgtgagacctgaaggttccaactttcctgtctcccactctgagaaccttgcccgccctgaggccaaccagacctcctgagtccacctcccacggcctcccctgcccgttccacacaccccgatatagcagggacccccgatggatcctgtcggcgcggcccccacgctcctgcaggacccccgtccccagagtggacccccaacaggaccccacaccgccttaaccaggttccaaatgtgctggggtccccagtcccctctgtgggaccacgacccctcaaaaggatcccagacccctaaaaggtctcgagggcagaatccccagaacgcttaggggcttctagtccccctgggtacaactcccgccgactccctcggaggtcctgtagcgagagcagggctcccagagagggacacacggccttcagcgtgcccccgaatccctcagagcctccaatccccaagaagaaaccccaatccattccctcagtgtctccctggaccccttcggctggacctcggccctgcagaaccccccacttcgcgggacgctcgctcaccatgacgcgtgcgagaacgcggtgcactcacccaccggcctagggctccgggcactctgcggaaactcgaccaattagagcccgactctggtctgacgagcatcccgtccgaccaatcagtgtgtcttgagccggcaaatcaccagggacgaggaggccgctcgcgttgcatgccggaaattgtagttcagatacgctggttcggatcgatcaaagtgaagattgtgtctgggaggcctgcgtggccgacctctcttaaggcttagttttctctttcctacacttatctcaaaggtttgcagcgaaagcatttattcccacctaagggacatttctgagagtagaattccctccccccatcaagaacattcaatggctcccacttagtagacgaagtacttagtactcctaagtactaagtaggctaagtactcagactgaattcagacccttctgcctgacttaaatctgctgctagcactattgtgcaccctatagtacaacttgcacccaccatgctgtctcatacctccaggcctttgtaaatatcctacatcttgcaatgccttcaagaatgcctcaatcttaaaataaaaacaaaacaaaagcaaaaaagaatgcctcaatctttttcacctggcaagtgccttattcatctctatcagctaggactctggctgtgctccacaaaatatcaactaacatgggttcaagcaaaaaaggaaaatttttggctcatgtgacagaaaatactagccatagtgtcagcttcaggcgtggctggatcaaggaccaaatgtcagcttcagggatctgatgttctttatttcaccgctaggaggaaagggcttctggtgtttgtgccccggttttgccatttgtctttctgtggatgagtgtgtctgcctgagtgtagacatatattgggtatgactgagtgtctgagcatctttatgggggtgggttcctgtgtgtggggcctgagtaattaccttttcgtttttacattttattatgtatttgtgtattaatttttttttttcttgagacggagtttcgctcttgttgcccaggctggagtgaaatggtgtgatcttggctcaccgcaacttccgcctcttgggttcaagtgagtctcctgcctcagcctcccgagtagctgggattacaggcatgcaccaccacgactggctaattttgcatttttagtagagatgaggtttctccatgttgatcaggttggtcttgaactcccgacttgaggtgatccgcccacgtcggcctcccagagtgctgagattacaggcgtgagccaccgggcctggtttatattttatttttttaactttcggctggcaagtgctgaatcctaagcgcactatcgcacgccacctcgtggtggagggcaaaagcgcagtctccctgggatggagaagtcaaaccagtctcacttgtggccctgggggctcccagccttagaaagcggcccatagttttatggacctcacactgggtgcttagcctgtgggcactaacatcagggactggcctgacttcttgtccaccgtgagggtgagatccaaaggctgggaaggctctttctctctggccatgcctcagtttcccccagggtacccgctaccttgacccttttcctcttgctcagtccctggccctggtctggatgtgcggggttggggtgccagtgagtaggtaggtcttcagcccatgtggaaggaaggccaggatcattgtcggggaggtcctcagaacagaagggtgggtaactggctgaagagtttgcatcatctgtgcatgtagcagtggcgctgctggaggtggcaggagctgcatgctcagctggacctccacagccattgatcactgccatgaggaccgtggctcacccctcctgagtggggaagggacagaagggaccaggtgggaagtgttgaagacttgagtccagccaggcatggtggcttggcgtatgcctgtagtcccagctacttgggaggcttaggctggaggatcgcttgaacccagaattttgagaccagcctgggcagcacagcaaaacacccatctctaaaaaaaaattaaattaaaaaaaaagttaaattagcccaacgtggtggctcaagcctgtaagtcccagctactcaggagcctgaggtgggaagattgcttgagcccaggaatttgaggctgcagtgagtcgtgatcatgccacagcactccagccctggcaacatgacgaggaaaaaaaaagaggctgggtgcagtggctcatgcctgtcatccgagaactttgggaggccaaggtgggaagatcacttaaacccaggagttccagaccaacctgggcaacatggggaaacccagactatacaaaaaatacaaaaattagctgggcaggctgggcacagtggctcacgcctgtaatcccagcactttgggaggctaaggggggcggatcacaaggtcaagagatcaagaccatcctgaccaatatggtgaaaccctattgggtttctactaaaaatacaaaaattagctaggcgttgtggctcacgcctgtagtcccagtagtagtcccagctactggggagtctgaggcaggagaatcacttgaacccaggaggcagaggttgcagtaagctgagatcttgccactgcactccagcctagctgggcaaggtggtgtgcacctgtagtctcagttacttgggaggctgaggcaggattgcttgcacccatgagatcaaggctgcagagagctatgattgcaccaccgcagtacagcctgggcaatagggcaagacactgcctcaaaaataaaaaaataggccaggcgcagtggctcatgcctgtaatcccaacattttgggaggctgaggtgggaggatcacttgaggtcaggagtttgaaaccagcctggccaacatggtgaaaccccatctctactgaaaatacaaaaattagccgggtgtggtggcagtcgcctgtaatccgagctatttgggaaggacgagaatcgtttgaacccgggaggcagaagctgcagtgagccgagatcccgccactgcactccagcctgggcaacagagtgagactttgtctcagaacaaaaaaacaaaaaaaaaaacccaataataataaaaacaaaattaggccaggagcggtggctcacacctgtaatcccagcactttgggagaccgaggtgggtggattacctgaggtcaggagtttgagaccagccttgccaacatagtgaaaccccgtctccactaaagatacaaaaaattagctgagcatggtggcacatgcctgtagtcccagctactcaggaggctgaggcaggagaatcgcttgaacctgggaggcagaggctgcagtgagccgagatcgtgccattgcactccagcctgcatgacagagcgagactctctctcaaaacaaaaaacaaaaacaaaacaaaataataaaaataagtaagtagaaaagaaaaagaaaaaagacctgagtctgggttgggtgagcgaaatctctagccgcacttggacactctgcagaggcttcaagttcaccccatccaagtctcattccctacaagcttccacagcacagaggatgaaatgggagcttccagtcacccacggcacgctcttcccttcacctccacctccgagccgttctggagtcctggtgggtttgcctccacgcacacacagagagtgatcattccagggggcactgcctcccctcagctcccaatgccccctgccacgggagcctggggaggggcttttacacactttgatcatgccatatccctatcctggaaactggggccccaaagcccccacctcactggggatgagggtggcgaagatgacgtaggacaaaccttagctggggtctggggtgcagatggcatcctatactccgccgtataaacaagtgccccctccgggttctgtcacttatatactttgtccagtctccctatcccttaaaaggcgtcccgcccatcatcttgtctaggactgtgtgcgctaagggtgaaatgcaaggtgctcagttttactgaagaaatctctccctggggcgctgagtgacagaaaggattttgaaattgtcagtcaacgtaccccgcccattctggctgagctgtgccaaccagctcagctttggatcttggcagagtgattggaaagcaggtgagtttgtttgtttgtttggtttttgagatagagtcttgctctgttgcccaggctggagtgcagtggcgcgatttcggctcactgcaacctccacttcccgggttcaagtgattctcctgcctcagcctcctgagtatctgggactacaggcacacactaccatgcccggctaattttcgtatttttaatagagacgaggtttcaccacattggtcaggctggtctcgaactcctgacctcaagtgatccacctgcctcagcctcccaaagtgctgggattacaggtgtgagccaccatgcccggcctgtttttgtttttgtttttttactctttgagacggggtcttttgctctgttgcccaggctggagtgcagtggctcaatcatggctcactgcagccttgacttcccgggctcaggtgattctcccacctcagcctcctgagaagctgggactagaggtgtgcactgccacgcctggctaatttttttttttttttaagagatgggattcaccatgttgcccaagctagtcttgaactcctgggcttaggccatcctcccacctcagcctctcaaagtatttggattacaggggtgagccactgtccccggccaaggcggatcttgtaagtcttgatctcaacactcatgttttccgtcttcctgtccaaatctgtgaactccaactcacaaaggtgtttctcagcttgggacagtgtagaaggcgtcatggaggaagagaggcagagctgggccttggagggtgggaaggagtttaaaaaggagacaagttgggggttgagggaggcgctccaggaaagaccagtagggtcacatgttggtactgcaaatatttctaaggtactggagaggctgggacagggataggagaccaggccagactagggtagggcagctgaggagcccaacttccttctaaggatgaggaaaagcttcaaagagatgagcagaacatggcagaggcagatcttttaaattttattactgttatttttagagacaatgtcttgttctgtcactcaggctggattgtagtgggctggtaatagcccactgcagcctccaactcctgggctcaaggcatccttcctcctcagcctcccaaaggactgggattacaggcaagaagtaattttttttttttttttttttttgagacggagtcttgctctgttgtgcaggctggaatgcagtggcacgatctggatctcggctaactgcaaccaccacctcttgagttcaagtgattctcgtgcctcggcctcccaagtagctgggattacaggcatgggccatgaggcccagctaatttttgtatttttagtagagatggtctcaaatttctggcctcaagtgatctgcccgccttggccccccaaagtgctaggattacaggtgtgagccaccgtgcccggctagaagtcagttttttatgttgtcgttgtttttgatgttatttttgagatagggtctcgctctgttgcccacggtggagtgcaatggctcaatcacagcttgctgcagcctcgacttcctatgctcaggcaattctcccacctcagcctcctgaatagctgggactacaggaatgtgccagccatgcccagctaatttctttttaaattttttgtagagatcagggtgtcagtatgttgcccaggctggtctcaaactgctgggcccaagccatccatccactttggcttcccaaagtgctaggattacaggctttggccaccgcacccggcaagaagtcagatgttaagtattatgaagatctcactgaatgccatgtatggtggcttgcacctgtagtccagctactctggaggccgaggtgagaggattgcttgagcccaggagtttgagagcagcctgggcaacatagtgaggccccaactaaaaaaaaaaaaaaaatcccactgagaccacctggggtgcgtgaggccagatagaccctgctgcacctcaactattttctgggagcacccctgacctcaggacacccaagtctgtcttcacacacaggacaagccagagtgggggcagtttgcaaccccaggagtgggtatataaacaccctgctctcttgtcccctgggtagaatcaattgctgggtcaagggctcaagagatacacccattcaaaagatgagcagtcggcgaggctgggtggctcatacctgtaatcccagaactttgagaggcccaggagggcggaccacctgaggtcaggaattcgagaccagcctgaccaacatggggaaacccgtctctactaaaaatacaaaaattagcatggtggcaggtgcttgtagtcccaggcactcaggaggctgaggcgggagaatcccttgaacccgggaggcggaggttgcagtgagccgagatcgcaccactgcaatccagcctgggtgacacagggagtctctgtctcaaataaaataaaattaaaataataaaataaaaaataagaagatgaacagttcaggggcgcttccagcgccctgggagcccgacattcaggattcccagctgctgcttttgggagccctacgacccagccctagggcttgcccctgagcccatgacccacagcgccgggagcagccctggccattggccctggagtggaaagagccggggccctcacccctggagtgggaccattctaggtgcacgctcactctatgctgtccccagaaccccccgcgggctaagcaccctctgcttgtgcgcgtcccctgcagggctcctcccgccttgcctccccaaccctccacctggcagccctcccggacaccccacgggctcttgagtcctcgtctcagggcttctggagggggcaccccaagccaagactaggcaagaatgaggcgagtcacagtcagtctggtccacggacgccacgcgcgttttatttgtggatatacacacaaataggaagaaggaaaggagccccccagggtggattgagtccagccgcccacctccaagcccccaccgcggaggggggcgtcactgttgggtcttctctgaagaggcctggagggaggtggggtccccacgtgccctcgccgtacctggcgagcgctctgggctggtgccaccgggtgatctcctaccggggccagccgtcggccaagggcagccggcgcagggcgggcccaggccgcagaggctctgccagggaccgggcgaggagcaagggataggggaaggtcttaggaaagtcgccggggcccccgggggccggagagaggcgctcagacttgatgctgactgggggggtcggcggggaggcgccgcgggttgggggaccctcctcgcccaggcttcggcccccactgcagggggaaagagagagggaggccgtgagctcagcgaggaagggaaggaagccaggggatggcacagcgtgggcaaaggcttggcaggaggaccctgggaaaggagggggtggcggtccctcttggggcctcaaaatagctgcccatccgtaccggaagtgtgcgcagtaccagggatggccaccaggggtcagcagcggccggggctttggaggactgggacttgccgtcgtctcagggcacttacctgggctgggaggacacggcggggggcccatcacccctcgagggctgccagggggccagggtggggggctgcaacaagccagggggcggtggagggtctcccaggccatattctggtgggcaggaattgggggctgaggcctggacatctccttaagccttctgcaaacctaaccacccccagtgacagttttgagttctggtgggtgggagggtgtggaacccccagagggcaggagtgcggacgcttcccaggtggggcagggcaggttaggggatgtacctggggggcctccggggaggaaggggaagctccccagtgggggtccgggagttgcagtggagcaggggttctgcaggccactgtagaggcttctctgtgcggagagagggtgaaggggaaactgaggcccacacccaggtcgccctgcctgccctcatcagccctgccacaccctcccctcactcacggaggtgtttagtccccctcggggcccagccaggccaccaggcaggtctgacctccgcccttccgtcggcaggtacagtgggggtggtgtcttgctggtgaggtggcttggtgagaagagagggtgcaccaggcctggggaagaggagaccccagagagagaggacaggcaggccatgtcaactaatgaagtctgaggtttagaggtgatgcacgcagcctggcaatgccagagccaagatgcacccaaacagcccctcaggacctcacccctgccccactgtcccatgctcacctgggggcccggctttgggggctgctggtcggaagggagatgggcggctctgggcgggcagtgcttccccaagcccactggggtcacagcctggtggcggtaaggccccgtataccacatctgggctgggcatagcaggagctgcaggctgtgggtagagaagggatgggtcagaggaccccaggccagatgggggtgccaagtccaagggagaaaatcctgatgagttcaggggcccagctctaccttcaggaagcctttgctccacctcccaccaggctccctacctgctcctccccctgccctaaccctacaggctgggggagcttctgtctggctctgcctgtccttgacaggtaggtccagagccaagacctctcacttagtgtagagttggcactgagggggctgcacagagtgtttgatgaatcaaagatgaaatgaaggaaggaactgtttgcctgttgaactcttattcatccttcaaagccccagctacagtgcccacttctcaaagaagcctttcctgaccaaccaggtagagacctgcctccaaactctaggatccctggctctaagcccctctctcagtaccagcctcaacgacttgggcctaggaagtaggaggaatgcctcattcacagggccagggagtcacttacatacagccggggtcggggcaaggccggatcacccccttcgcctgccagcctccgaaacttctctcctggctcctcaggcccttcatccggctccagctctggcccatcgaggccaatgcccctccgcttcagcgtctatggggacaggagacaacagggtagacccttacccctaccccacccagggaacccagttctatgggagaggggacagaccatccccacccagctccatgagtggggaggaatgcaggcatggcctgctctagccaaaccccactgaccaaaccccggtgagttaccagctagcagtttcctcccctgggaccgaaaagcccaaggacctgcccagatcaacacagcaggagctgagatccatgcaggcctgttggcgctgtcctaatgctgctcctgacatgactccaggacctccattctgcccccacttgcagcctcatagcctggcatcaaaagctgcttaagaggccgggcgcggtggctcacgcctacaatcccggcactttgggaggccgaggcaggcagatcgcttgaggtcaggagtttgagaccagcctggccaacatggtaagacctccatctctactgaaaatataaaaattagccaggcatggtggcgtatgcctgtggtcagagctatttgggaggctgaggcaggagaatcacttgaatccgagaggcggaggttgcggtgagctgaaattttgccactgcactgcagagtgggcgacaaagcaagactcattctcaaaaaaagaaaaaaactgcttaagaaacgccagcagatttcctgagctgccttctcctggggccacagaaccgcatgctcccggaccccaacctcttctttgccaacttctgccccacacttccaaaacactgcggactcccaggcctagtcccagcccgctgctctctgcagcccttaggctttagcttcccatcccagtgaagactcctctgtcttatttatttatttatttatttatttatttatttatttatttattttttgagacagagtcttgctctgttgcccaggctggagtgcagtggctcgatctcggctcactgcaacctccgcctcccgggttcaagcaattctcctacttcagcctcccaagtagctgggattagaggcatgagccaccacacctggctaatttgggtatttttagtagagactgggttttgccatgttggccaggctggtctagaatccctgacctcaagtgatctgcccacttcggcctcccaaagtgctgggattgcaggtgggagccaccgtgccctgcccgatgtgctttatttctgctgtccccagaagggctcccccactcccaaatgtttggatgagtggagggtcccttctagggacagcagaaataaagcacgtcagccacaaagccagatgaagacactcatcttttgtgcaaaccaagagtccctgggctctgagaaagcagcgtgcacggggccttgtggggctggggaggaggacctggggtacctcgaggatgtcagtgttggtgcggctctcgtggggctcgctgtactctgtgtacttcagcagcacacggtccatgtccgtgctggcatactggaagaggcggttggcgctgttgaagatgatgagggctatctcacagtcacagagcacgctcagctcataggccttcttcatcagcccgaacttccgcttggtgaacgtcacctggacccaggacccacaggggcaggggagagaagaagaagagatgaatgtggggtggtgtaggggaattggcagggcctaacccttcctcgaacatgcctcaggattctttctggctgagctggtaattctcatgtcacaacctggcaaactcctactggagcttcaaaacccagcccaaatgtctgggaagtgtgccttggcttcccaggcagagtccacatgctctctctgggctttcccagttctgggcctccctctgttctggccctctgagttaggtgtggctgtgtcaagctccatctcccctatggctggggttccagtcatcagggagaataaatgaataatgatcatgaaaatgagcaggccaggtgcggtggctcagcctgaggtcccagcactttgggaggcccaggcaggaggattgattgaggtcaggagttcgaggctagcctgggcaacatggtgagacccctgactctactaaaactacaaaaattagcctagccaggcgtggtggtgggcgcctgtaatcccagctgttcggaaagctgaggcaggagaatcacttgaacccaggaggcggagcttgcagtgagccgagatcgctccactgcactccagcctgggcaacaaagtgaactccatctcaaaaaaaaaaaaaaaaaaaaaaaggaaggatggaaggagggatggaaggaaggagggaaggagggagggaaggagggagggagggaaggagggagggagggaaggaaggaaggaaggaaggaaggagggaaggagggagggaggggaaacaagaaacactgacagaccaggcgcggtggctcacgcctgtaatcccagcactttgggaggccgaggcgggcagatcacgaggtcaggagttcgagactagcctggcccacatggtgaaaccccgtctctactaaaactgcaaaattagctgggcttggtggtgcgcacccgtaatcccagctactcaggaggctgaggaagaatcgtttgaacccgggaggcagaggttgcagtaagctgagattgcaccattgcactccaggctgggcaacagagtgagacttcatctcaaaaaaaaaaaaaaaaaaaagaaaggctgacatggcatcaggactcctcatgcctcctcattcccctgcagttcaattggtcaggtcagtcccttgcctaggccatgccccctgctaggaatgtctttcccagccactgttccacccagtgaactcacctgccgattcctttggtccaggatgcgggagatctggatttttttcctccccatcgtcccaggctgagtggaatgatctttgtctaggaggagaagagggagaggacagagtgagtgggtggagagtggggaggggtaccccagcctcacacctctcctctgtctgcccctgccagccactgagaggaagatgatggggaaaatcaaggcaggctgggtcactgtcgcagaccccgcccccggccagccttaggatgcagtagaggctcaatgaacatgtttagaccaaatggggcatggtggctcatgcctgtgatccctagcactttgggaggccaaggcaggaggatcacttgagcctgggagtttgaggccagcctgggcaacatgttgaaaccccggctctacaaaaaatgcaaaaattagccaggcatggtggcacacgtctatagtcccaggtactccggtggctgaagtaggatgatcacttgagctggggaggttgaggctgcagtgaactatgatcttgccactgcactccagcgtgggcaacagagacccagtctttaaaggaaaaagaaaacagaataatagaaacgcctcctgctctagcaggaggatgcaggcacactctggaaaggcctccagctcagagtccttgggccagggtgtgggcctggcatccacttggtgacttggaagaaatcctgtaccccactcaaggagatgtgagatcgccctggtaggggtcccagaaggaggagactgctggactatgctggggtccaggccttccccagagacccccactcgaggttcctgggaacaatcgaatcatgtggcctgtcctgcagccgccgccctctgtacagacgtcccctgacaccacaggggacgtccccgctccgccaactgtgtgaccacactccacctcccagcctctaccatgtcacaggtgactgaggcttcaggcaaggggcctctccagggtcacgcggacctacgctcaggcctggccttccctctgaccctcagggcagccctcagcacagaagaccctttccccaggcctcagtttgctcttctgtgaatgggctggtaggaaatgctgagcacccaccaccaggcttggcaacaagttatcaagaaatccagatcaggccggtcacggtggctcacgcctgtaatcccagcactttgggaggccgaggcaggcagatcacttgagatcaggagttcgagaccagcctggccaacatgctaaaaccccatctctatttttttttttttttttttgagacgagttttcactcttgttgcccaggctggagggcaatggcgcgatctcggctcactaaaacctccgcctcccaggttcaagtgattctcctgcctcagcctcccaagtagctgagattacaggtgccctccactatgcccagctaatttttgtatttttagtagagacgaggtttcaccatgttggtcaggctggtctcaaactcccgacctcatgatccacccatcttggcctcccaaagtgttgggattaccaccgcatcctacccaccccatctctattaaaaatgcaaaaattaaccagctgtcgtggcgcacacctgtagtcccagccacttgggaggctgaggcaggtgtgtcactgcactccagcctgggtgatagagcaagactctgtctcaaaaaaaaaaaagaaaaagaaaaagaaaaagaaaaagaaatctggcttggcgtggtagctcatgcctgtaatcccagtattttgggaggctgaggtgggtggatcacgaggtcaggcgttcgagaccagcctggccaacatggcaaaaccctgtctctactaaaaatacaaaaattagccaggcatagtggtgggcacctgtagacccagctactcaggatgctgaggcaggagaatcccttgaacctgggaggcggaggttgcagtgagccgagatcccgagattttgacaggctgggcaacagagcgagactccgtctcaaaaacagaaagaaagaaatccagattgttctctgggagtgttctcagggcttcccagacccctgcccaagcggtctgggcaaggccctccattatcccagggcccagaagtgttagatacctcggctggcagatatggcatgctgtgtgaccccaggcacaccctctgccctctctgggctgggtctctgagcccccacaactatgtagagcccaagctgtcagtcccagaccctcagctccggcttgacttgctaaatttaacctccagggctaattttaatccccagccggaatcgggcctgttcccacggctgggatatgttgcccccaccctgatgggtccctggggggtggacgggggccttggtccggaggtcccagggccaagatgactccggaaatgcccctgatgcccagggtcccacgagagcagcagcagggctggggcttaggcctgagtctcttaagcctggaagacctgactcaagccccttctcactctgtctgtccccattttagacacagacaccatggctagggcagaggtcatgtgatgggggagaactgggaagtctctctctgcactgagaccctgagagctgagatagaaagtgagttccaggcagaaggaagagcaggtgccagggccctgaggagggacaagaaacagcgggagggtggggatgaggccacagaggttgggccattctaggactccttcttttgggtttccttcttttaatttaatttattattattatcattattttgagacagagtctcactctgtcgcccaggctggagtacagtggcatgatcttggctcactgcaacctctgcctcccgggttcaagtgattctcccgtttcagcctcccaagtagctgcgattacgggcatgcaccaccacacctcgctaatttttgtatttttagtagagacggggtttcaccatgttggccaggctggtcttgaactcctggcctcaagtgatctgcccgccttggcctcctaaagtgctgagattacaggcgtgagccaccacgcctggccatatttatttttttgagacagtcttgctctgttgcccaggctggagtgcggtggtgagatctcagctcattgcagccttgacctcccaggctccagtaatcctcccacctcagcctcctgaatagctgggactacaggtgagtgccaccacgccctgctagtttttattttctttttgtagagatggagtctcactatgttgtctaggttggtctcaaactcctggctggaagtgatcctcctacctcaccctcccaaagtgctgggattccaggtgtgagccactgtacctggcccactgtgggccttctgagctggaggagggctgtggattttggtctaagagtgatgtggagctatgagagcatattttattttatttcctattgtattttattttttatttttaatatatatatatttttgagatggagttttgctgtgtcaccccggctgaagtgcagtggcgtgatcgcggcttactgcaacctccacctcccaggttcaagtgattcttctgcctcagcctcccaagtagttgggacaacaggcatgtgccaccatgcccagctaatttttgtagttttagtaaagatggtgtttcaccatattggtcaggttggtctcaaactcctgacctcatgatccgcccgccttggcctcccaaagtgctgggattacaggcatgagccaccgcgcccagccttttattttattttttgagacagaggcttgctctgtcatgtaggctggagtgcagtggcacagtcttcacctcccgggttcaagcgattctcctgcttcagcctcccaagtagctgagattacaggtgtgcaccaccacacctggctaatttttgtatttttagtagagacagggttttgccaagttggccaggctgatcttgaactcctgacctcaagggatccgctggcctcagcctcccaaagtgctgggattccaggcgtgagccactatgagaaggttttaagcagagaagggatggggcttggtttattattttaagactcagctcatggcttccatggggagcaggtctgttggaggccagggtggagatcatgggcggctggagagaaggcaagggctgtgtccgtcttgacagagactgggggtagggccccctctgtgctaggcctgtgccttgcactttaagtcactgtactccagggtgcgttagtcctccagaagccagcaggccctacaccaactctggaggcaggcctgacaggtgcagatgaactcacgcaggagtttcactctcctgaaccccagtgacattggaaccaaagccatcctccactctagcccctgagggaatctacccaaccaaacacagctctgagcatggccccctcctgctcatacactctccatggctccccactgcccttatgagaaagttctagcacctagcctggcattcaagtcttcttcccaaatcagctcttgcctacttctctctcttcgataaatatctctgactagaaggaccctttcccctttttcaccaagccaactcctatccaaacgtcaaaacccagttcaaaaaacccattcctctaggaagtcctccctgccattcttctggtctcccagagtcaccatcctcctctaggtcagattccatggcattgggggtatatatatccagatttgtctcctccagactaaaagcccctctggatcagggccaggaatggacagtaaggtttggtgagcagagtagatcaacagagatgtcactgaccccctccacaaccctacagcttccctcaacaacttcctctcagactgccccagctgataccctgcccagaaatacatgcacatgcaaatccagccactcagcattgacctgtctcgggcccaggtgtgaagggccaggcaaagaatgcggaggcggcaggccagagtgtgcatgtatatttgtagtcacatgcaaatccctgcccagagccgcagacagaccctggtggcccattctccagatgttggtgtgatcggaactgctgggggaggtggcagcacaggctgaatgtgccaggcacgaggggggaagctgaggtttggggaggcctcttccgcacacacataccctccctgctttgtccagccagaaatcagagagctgtggcatctgcccagcgcagaagcacagaggtggacctattgaccaaggaatggagcacagaagaaagaacaggagaagaaacccaggagagcttcttgggggaggaggcatgtagttggatgtagacgcagaggctggatgggagcctgagtagaaggggagggaggtgggaatttgaagctaagagtccagtaccttcctactcctttcattgcaccctcatacttagcgtttattaagtatcaacctgtgcaagtcactgagccaagctgacctcagaagaagtagaaagcttaagtagaccaacaaccatagaagattagaaaggtgactcaggacctaccattaaaaaggtaataaagtgggctgggcatgatggttcacacttgtaatcccagcactttgggaggccgaggtgggaggattgcttgagcctagcggttcaagaccaacctaggcaacatagcgagacccctatctctaaaaaaaaaaattttttttttaaaggcaataaagttcaaggctgcagtgagctttgagctgctgcactccagccagggcaacagagtgagactctgtctctaaaaaagaataataatttcaaaattaaaataataactaaaaaacatgtttaaaggcccaggtggttttacagctattttctcaaatctcacagaacaggaaagtgcagcattatttcagtgaacttagatctttgaaatagacgggatctagccgagtcactttttttgtttttgagatggggtcttcctctgtcgcccaggctggagttcagtggtgcaattatagctcactgtagccttgaactcctgggctcaagtgatcctccagcctcagcatcccgagtagctgggattacagctatgtgtcaccacacccagcaaatttttaaaaactttttatagagatggcgatttgctgtgttgcccaggctggtctcaaactcctggctactcccagatacttccagctacttgagaggctgaggtgggaggattgcttgaggccagaaattggagaccagcctgggcaacacagcaagaacctgtctacaaaaaaagtaaaaattagctgcacgccgtggcacacacctgtagtcctggctatgtgggagcctgagacgggaggattctgtgagcccaggagttcaaggttacagtgagcgatgatgatcttgtaagctcttccacttccagctctcatgcattgctggtggcagaggaaaaagggacaagcacttggataatcctctggcatctactaaatctgaacagatgcctaccctgtgacccaggaattccgctcctcgatgttcaatattcacgcaagagaaatgggtccaagttacacctgaggacacagacaagaatgttttctacagcttcatacatcattgcctcaaactggaatcaacctggaagcccttaatgggagagctggtcaacactttcttgttgattctatgatcagttatagcacagcacagaaaaagggtgcactctcgctgcacacaaccacgtggatgaatctcagagaccattggccaattcgacgatcccagactccatcgagaagatgcactgtgtgattttatttacatgaagtttcagaacaatcaaaactcactgatgcagctgggcgcaggggctcaagcctgtaatcccagcactttgggaggccaaggcgggcagatcactggaggtcaggagtttgagacaagcctggccaacatagcgaaaacccatctctactaaaaatacaaaaattagctgggcgtgctggcatgtgcctgtaatcctagctactcgggaggctgaggcaggagaatagcttgaacccaggaggcggaggttgcagtgagccaagattgtgccattgcactccagcctgggcgacagagcgagactctgtgtcaaaaaaaacaaaaaacaaaaaaccctcactgaggctgatggatatcagacagcactttggtcaccctgggcagaagctgtgattaggcagtggcccaagggggaagtcccaggggctagggaagtcctgttcctggatccaaggtttgggtacacagatatgttcagtttgtgcaaatgtgttgagctcaactctagtggtttgtgcatttttcttcgtgtgatttatttcaaaaggaagatttctttttttttttttgaagtggagtctcgctctgttacccagactggagtgcagtggcatgatctcagctcattgaaacctccacttcccgagttcaagcgattctcctgtctcagcctcctaagtagctgggattacaggtgcctgccactgtgcccggctaatttttgcatttttactagagatgggttttcaccatgttggccaggctggtcttaaactcctggcctcaggtgatctgcccacctcaggggccaaagtgctgggattacaggcgtgagcatgggcgcccccggcccaaaaggaagatttctaaaaagctccagccagagcaacatagtgagaccctgcccctaaaaaaaaaaaaaaaaacaaactagggccaggccaggcacggtggctcacgcctgtaatcccagtgctttgggaggctgaggtgggaggatcacttgagcccaggagttcaagaccagcctgggcaacatggcaaagccctgtctgtaggaaaaaaaaaaaaaaattagctaagtgtggtggcatgcctgtggtcccagctactcaggaggctgaggtgggagaatcacttgagcccaggaggtggaggttgcagtgagccaagatcacaccactccactccagcctgggtgacacagccagacgctgtctcagaaaaataaataaacaaaaataaaaaaatttagccaggcgtggtggtgcaccccttagtcccagctactcaggagtctgaagtgggaggatcacttgagcagggggaggcagaggttgcagtgaactgagatcctgtcactgcactccagcccgggcaacattgtgagactgactcgaaagtttttttttcttttttttgagacagagttttgctcttgtcgcccaggctggagtgcagtggcgcaatctcagctcactgcaacctcctcctccccagttcaagcaattctcctgcctcagcctcctgagtagctgggattacaggcacacaccactacacccagctaatttctgtattttcagtagagatggggtttcaccatgttggccagactggtctcgacctcctgacctcaggtgatccaccagtctcggcctcccaaagtgctgggattacaggcgtgagccacagtgcgtggcctaaaaaaaaaaaaaaaaaaaaaaaattaaatctagcggggcatggtggtgcctgcctgtagtcccagctacttgggaggctgaggcgggaggatcacgtgagcccaggagatggaggctgcagtgagctatgagtgggccactgcactccagcctgggtgacagagtaagaccctgtctctaaaaataaaaaagctccttgctgcttatggctgctgtggggagcagtgtctgttcaggctagagtgaggtgacaggaagaggctgggccagtgggaaatacagagtttgaatggagacaggggtggcacctgggcagaagtggtgaccaaagggtgcaggatgtgctggtgacctgggatagaagaggagcctggtgatcccaggcctgagcgatgtgggggtgagggggaattgggaggacaaaagaagagctcaggagtgcggaagcatcagaaactttctggcagtatctgtggtcactaagtcaatcaacaaacattaccctgaagtccttcaagccatagattatcatctccccagcctggcgaggccccttagccccccagtaatggagatggggtgctggagggaatcccacccttccactgacccttcccctctggcctctctgcgtggtaggactcagttctcttacctgttaattgggggtgagaatccttctcccaccagctgggaagagggtagggagcaggggtctactgaactttttttttttttttttttgagatggagtctcgctctgttgcccaggctggagtgcagtggcgtgatctcggctccctgcaaccactgcttcccaggtttaagcgattgtcctgcctcagactcccgagtagctgggattacaggtgcacaccatcacacccagctaattttttatatttttggtagaggcggggtttcagcatgttggccaggctggtctcgaactcctgacctcaagtgatccgcctgctttggcctcccaaagtgctgggattacaggtgtgagccaccacacgggggcctctattgaacttttcttctggcttctgggaaaccaaaaggaagaaggtctgggccttggaactgggggcgctgagtcagtacagcatcctgcaagaccaccttgaaatactgtcatcagtcacctgcttcctcccccataaaatgggtcacaggatcctaacctcacaggctttgcagaggggtttaagagaaaagattaggaacaagtcaagttccctttcttggcacccctgcgggactttactggggggatgagctgcagagtcacttcgccagacccctgagcccgcagggaggccacggcttggcagaggaacccaggccgggaaaggagaagtgagaggcaggtgggttgggtgggggtgggggtgagggcccgcgggaggcggtgaagcggggagggggcgctgctcccggcccctgcagcgaatcaggcctgccgccccgcctcacgcaacccaggctgtggtttcatcacctgctccccaagtacctcattatgggcgacaggaagagccccttggaaagccaggacccctcctcccctctcctgggggctccagcggctccgaccccagctgcaggcgaccctccctccccagccagagccctgggcccgcctcctccccgggggcctagggaggtggtacccaggtgggggggcatgtaggtgacctggcggcctggctcagttcacagcggtccctggagccccgcacctgccctcagggactcaggggagacggtgggctcgggcagtgactcccctgttgctgagcttctctggaactcagtttcctcctccagaaagtcagggggcagcaggggccacctcgctgaactggggggaggggcttcacagtaaggtgctttacagatgcggggaggatttgtggtcgatgggtcctgatgcctctcagaaggccttggggtcacctctccatcctgggggaacccagctcagattgcgggccccaaaaagtccctggtggagtgctgagggacaggggcggatggggttgggggtcactccatccttgtatgggcataatgggaggtagaaatattccccacacacggagacccccaaacagagccgcagaaaatccacagatgcccgaaacaacagatcccccaaatacacaagtattcctcctgcgaaagtccccaaaatacatgcagttcacgatacgccaaaccccccaacccacacagctctccaaacacacacatccccaaaacacatcctattccctctgcatagacagaccccaaaaacactcagacatacccagatgccccaacacatgccaatcccccaaatgcacagacacatacagatctccctaaacacatggccgtcccgcaaatacacacagacccctttcccctgaacaatgtggagacccccgccagacgcatgcagactcttccaaacatatgcagactccccccaatccatgctggtcccccattacataggtagggcccccccatccctgcagtgataccacccacactctagctttcttcttttttgttttttttttttgtgagacagagtctcactttgtcacccaggctggagtgcagtggcgtgttctctgctccctgcaacccctgcctcctgggttcaagcgattctcctgcctcagcctccccagtagctgggattacagccatgcgctaccacacccagctaatgtttgtatttttagtacagacagggtttcaccatgttggccaggctggtcttgaactcctggcctcatgtgatctgcctacttcggcctcccaaagtgctgggattacaggccaccatacctggctgggtttcctctttttaattattattatttttttttgagatggggtctcgctctgttgcccaagctggagtgcagtggtgccatcatagctcactgcagcctccaattcctgggcttaagcattcctcccacctcagatttcccagcagctggggctacaagcgcacacctaatttttaaccagactatgccaggctaattttttttatttttgtagagaaggggcttcattttatcacactggctggtcttgaacttccggcctcaagttatcctcctgcctcagcctccctaagtgctgggattacgggtgtgagccaccacacaggcctggctgccttcccaaggccgggtgctctccacccaccaggggtgaaatgcaggctgggggcatctgaggctagatttgaatgggtagtgtttgaatccaggattcttagaatgttccagctggagaaggccccatgggggtccttttttccataggtccctctggcacccatggggaaagtgaggcccagtggggagccctcagaccctccttcccacctctccctgggcctgctcctgggagggacagctcctgttcgaggggcaggagtccacggtgagtgggaccctctgtgggacgccccctctacttcactccaggatcccattttggccatgcacagagaggccagggccggggctgtaggccagtcagtccaggattcaaatcctaaacccgccacttgcccactgcgtgatactttctgagcctcggtttcctgtgtttgcaggggtccccacaaactccccatgtacccacccacctctcccctcacttgaaaaggtgtcatctaccagcagactcccagcccaccttctgcccctttgggggcatctgcaacaccagccccaaactgattccctacttgcccatcactctccctttgcccggactgtgtccaaccccgggacacccttctaggtttgcccaagtccaggagtgtctccatgtcctctaaagacctgcagaaaacgctctttctggaggcatcaatcttttttaatatttattttaattttttcaggcagggtctcattctgtcacccgggctggagtgcagtggtgtggtctcgactcactgcagcctggccctcccggactcaagcgatcatcccacctcagcctctggagtagctgggagtagcacggcgccacacctagctaatttttgtatttttttagagccggggtctccctgtgttgcccaggctggtctcaaactcctggtctcaagtgatcctgctgcctcggtcttccatagtgctgggattacaggtgtaagccaccacgcccggccaaattcaactctttctgcagcacctcagccctatcagactttttggtgtgtgtttctttattgctttctttgatgagcatctcgccctgccggcttcccagcgcctagtacatagaaggccctcaatcacccttccttgaatcaacgaccaaacaactgcttcacagacagaagaaacactgccaacttgctcagttttctgtttttcttttttctttttttgagatggggccttggtctgtcacctagactggagtgtaatggcacaatctgggcctactgcaacctccgcctcccaggttcaagccaatctcttgcctcagcctcccgagtagctagggctgcaggcgcctgcccctccacatggctaattttttgattttttgacatcttattttttgtagagacagggtctcactaggttgcccaagctggtcttgaactcttgagctcaagcaatctgcctgccttggcctcccaaagttctgggattatagaggtgagccaccacacccagccctacttgttttttcttgagatgggtttcgctcttgttgcccaggctgaagtgcagtggtgcgatctcagctcaccgcaacctctgcctcccgggttgaagcgattctcctgcctcagcctccctagtagctgggatcacaggctcgcccccaccatgcccagctaattttttatttttagtagagacagggtttctccatgttggtcagaatggtctcgaactcctgaccttcaggtgatccacccacctcagcctcccaaagtgctgggattacagccgtgagcccggccctacttgttcacttctcactgaaacacctcatggtccacacaacaaatttaaggccccatccagcccacaggctgccagtttgtggcccttcctctaaacaaccttcacagcaaaacagccaattggacagtgctgatgctcctctcaggccaaggaactggccctctgaaggtcccactgcccagcttgggagaaaaccacgtccaggtgaccatccatggcaaacctgacctggcacaggcaccctcacctgccaagaaggcctgttccaggccgggtgcggtggctcacgcctgtaatcccactactttgggagaccgaggtgggcagatcacttgaggtcaggagtttgagaccagcctggccaacatagtgaaaccccatctctactgaaaatacaaaaattagccgggcatgatggcgggcgcctgtaatcccagctactcaggaggctgaggcaggagaatcacttgaacccaggagtcagaggtcacccagcccatggagccaagacagaccccgcagtctgaatttgaccctgctgtcccatgcaggctagagtctaaggccctctcaggcccctagtgatgtcccctaagccacagtagtggctgcagggacagcccaaggttttcctctctttgttccagagaaagctctccctgcggggcctcagaaatggatccccagatgccccagcctccctgcttgggaaattagcacatctgtcagcgctgggcagaagggaccctgcccacagcccggcagcccgaagatgcagccagcagggaccccgagatggggctttaggacactgtcagtccccaatatcttcccgcagaaatgtctaggagcccctcaggtgctggggatgcaggagcagggggtgggcagagcaaggcctccccccatcacccagtctgatgggggaggcaacagcagccacataaccgtatctgggaagacggccttcaaggaagaaattcaacagggggaggcagtggagggtggcagggagagagctgctttggacagaggatccaggagggtaccacacctgtaatcccggctactcaggaggctgaggtatgagaattgcttgaacccgggaggcggagattgcagtgagccgagatcgcaccactgcactccagcctgggtgacagagcaagaccctgtctctgaggtgtctcagggaggtgggagccaggtggacacaatggcaggtgcaaaggccctgaggtgggactgtgctaaacaggtggcttccaggagcaggcaaaccccacacatctggggtggagtgagccaggagtggccagagacagagaaggtcagagaggcattgggggacagagagagggtggactgtagagcaatagggagccatggaaggtgtgtgaggagggggaggactgtggtctgatttggaattttcagaagaccctgtggcctgttggagcaggaagccaggccagcatccagccagggatggtagggcttggaccaggcacaggccacaggttggaacagtgggcaaggcaggcccatgcccacagcagccatgactcttattacaatccacctccatttctcccttcctcaggccccaccttgaccttgggtgaaactgggcttggagggaaacagcacctggcagagggcagagaggaaaggggcctggatgggctcacaaacacctccacttggtcacagcccagatgggaccttctgttattgagcccttactgtctgcccgggcccacaccccgcctcatttacatataagacctgcctgacccccagacaccccagggaagcagcgatagttgccctgttttgcacaggagtgggcaggcttcttccagggccacatggtgagacctccagatccccacccaatcctgggcttgtaccccagggccatcacgtggcacctcaatctcaccacccccacccaggctgggaagtgggcctgggcttgtccagcccagaatcaccgtcacagggtccaagaaactcaatcctgggccgcagggtatcagggtaaccacacaagtccccaagatacagccccagagaggccctttgggggctgagaaatgggatttaacttccttgcccaccccatggggaatcatgggccagggctggggcgagttccctgaccccaaaagggatcccagacacatttctaagtcgtctcagaaaaatggcatctggttgggctcatgcctgtaatcccagcactttgggaggccgaggcaggaggaccatttgagctcaggagttcaagaccagcctgagcaacatagggagacccccccatctccaattaaaaaaaaaaaaaaagccaggcaaggtagcactcccctacaatcccagctactcgggagactgaggtgacaggatggcttgagcccaggagttcaaggtcacagggagccatgactgcaacactcaaggaaagacagaaagacatctgtctctagaccactctgtgccttgaatcttccagaagggcagggcgtggtggctcatgcctctaatcccagcactttggaaggccgaggtgggctgatggcttgagcccaggagttcgagaccagcttgggcaacatagggagaccttgtctctataaataaataaataaataagtgggccaggtgcggtggctcacgcctataatcccagaactttgggatgccaaggtgggctgagtgcttgagtacaggaattcacgaccagcctgggcaacatgacaagaccccatatttataatttttttttttaattagctggtcacaggctggccacagtggctcacgcctgtaatcccaggactttgggaggccaaggcaggtggatcacctgtgatcaggagtttgagaccagcttggccaacatggtgaaactctgtctctactaaaaatacaaacattagctgggaatggtggcacgcacctgtaattccagctactcaggaggctaaggcagaagaatcgcttgaacctgggaggtggaggttgcagtgagccgagattgtgccactgcactccagcctgggcaacagagtgagactctgtctcaaaaaaaaaaaaaaaaaaaaaattagctgggtgtgctggtgtgagcgcgtattcctagctcctcaggaggctgaggcaggaggatcacttgagcccaggaggcagaggttgcagtgagctgagatcacaccactttactctagcctgggcaacagagcaagatgctgtctcaaaaacaaagaaagaaagaaagaaagaaagaaacctcttccagaaggccaaacacccaacatgtctacactcactgcacccaagttggggtgagcaaatgttttaaattccccttctcttcttaatttgcattttccagatgtccacctggttgggtcatagtttaaccaaataaatcattcgttgggatgggaaagccaagagtgggttcagcttgctccgctcacaggagctgccacaaagttcagagaggggcagccacctgttggggggtcacacagagaggagggagaggaagctgggcctcgtgaccccagcctctgttctcttgggggactgaggcatggccttgagctccatccttttttgaggggcctagtgttactacctggcctcagccttccctcctgcaaaccagcttcctgctctctaagatgacatcccaagatcctaactgtcctgaaattctgtttgctggaggccaagcttccccctttactgaacaacaggaaggggacatgagggaacaagcctgcctttttagaaagcccttttcatctctggaaatcagtcctcacacactggttctccgaagtcgaaatacttttttgtatccagtttccttcactccaagagtctgagagttcttgtcccgaatgcccaaggtccaggggccctgcccttccccagggatgattcttggccaggctagcctgaggccttgattattgttttgtttctttcttcttttttttttttttttttttttgagatggagtttcactcttgttgcccaggctggagtgcaatgacacgatcttcgctcaccacaacctccgcctcctgggttcaagcgattctcctgcctcagcctcctgagtcgctgggattacaagcatgtaccatcatggccggctaattttgtatttttagtagagatggggtttctccatgttggtcaggctggtctcgaactcctgacctcaggtgatccgcccgcctcagcctcccaaagtgcttggattacaggtgtgagccaccgcgcctggccatttttttgtttcttttctttctttttgtttttcttttagagacaggatcttgctctgtcacccaggctgcagtgcagtagctcagtcatagctcactgcagactcgaactcctcggatcaagtgatcctcctgcctcagcctcccgagtagctgggactatacacataagccaccacacctgcctaattaaaaaaacaattttttttggccagatgcggtggcttactcttgtaatcctagcactttgggaggctgaggcaggcagatcacatgagaccagcctggcaaacatggtgaaacaacgtctctacaaaaaatgcaaaaattagctggtcatggtggcacacgcttgtagtcccagatactcgggaggctgaggcagaaaatcaatcacttgaacctgggaggcagaggttgcagtgagccaagattgagccactgcgctccagcctgggtgacagagtgagactctgtctcaaaaaaaatttttttttaaagccaggtgcaggggctcacgcctgtaatcccagcactttgggaggttgaggcaggtgaatcatttgaggtctggagttcaagaccagcctggccaacatggtgaaagcccatctctactaaaaatacaaaaactagccaggcggtagtggcacgcgcctgtaatcccagctacttagaaggctgagggaggagaattgtttgagcctgggagctggaggttgcagtgaacaaagatcaccactgtactccagcctgggcgacaggatgagaccctgtctcaaaaaaaaaacaaagaaagaaaagaaaagaaaaagaaaatgggggtctcactatgttgcccaggctggtctcaaactactgggctcaagtgatcctcctgcctcagcctccaaagtgctgggattacaggcatgagccacagtgcccggccagctatttctgactaattgggtctgcaactaggggttagggtggccaaggacacaggtcacccatatctgcagccctggaccccaaaagagatagggagggaggactgtgaccgtgaaagtaatgctgccaccaccttgtcatgtgctaacaaccacacggggatgtgactcttgttcctgtacccattgaggcaaagggaggagagttggccccggcagctgttgctcccccgttccaaggttttgtgcctaccatcctgctgtgacaaacgagtgtacacccacagcaagaaggcatagggttgtgcacaggggatgcgctaatgctaaaggagtgcacaccaggagagagggacatcacatgccacatcacagagctcacagacacataatagggcctcacagcaccatgattttggacacacagctaactctccaactccccaactcacaccaaatctcagacgcagagcccttggacacacaacttccagacccacacccttcagacacacaccccttggagacacaaccccctcctgccacaacctcggggactcaccaccccacgacacacacccctttagacacacaccccaccctgggacgcccagcagtacacccggacctccaaaacccacccagcccgcagaagccgttcagaggacaccacaggagtctcaacccgatatgacacgcacctgctcggcctgggccctgggacgctgggcgcacggacccgcggcggctgcacgaagatcaggggcccgcggccgcaggtgccttgggagcgggcggtcctgcccccgggagctgattgggcgggacgggcttatttgcatacagggcgtcaccctggaggcggcgatgggcgtgcacttgggcgtggccccgacccgggagttcatgggcctgggactcagacgcgaaaggatgctggggcgccatgggtgggggcgcggataaggaagaagcagaacggagggagggggctggatcagactggccaggctttccccgccctcactgggcgcccttgaccttactgccgacccctgaccctactgtgaccctaaccctaattctaaaccttttcctaactcggcccaacttgcctggattgattccatcctgagtgaaatagactccgatcccggaccccgtcgccccgaggaaccaagcccttctcgcaggcaacgctgaccctcgcgctcgctagaatggaaagactgcaagacggggctctcgggtggcctgtgtggcctcactcaactgtgcctcctggggccagatatgtgctcccacagggagtgacagaccctccgcagctactggtccctcaagcccgcaccgcctgcccctccacagtccaagacaaccacactgcttccaccaaccacttccctctccttacctctccccgctaaaggctgttttctaaacttcaaaggtcagctgtgaggggccttccaggattggaccccagcccagaactctaaatccaccccttcccctgggatcccagcacaggccagacccacaggaagatcagagcaggggttggtgaatgtatcaatgtgaaaagaattacaggataaagatggctctgggatgggcacttctggagaagcccccggcccgtctggggcaggcaggggatccatgcactcccctaaccctgtggggtcaggcttgggccagaggagggatgggaggctgggacaggccagaattggggcaagggctgtgccagaggagtcagggagggtttctcagaagagagggcatttgtgctgggctttcaagtatgtgtaggagtttgccactaggagaaaggtttttcttgtttttttcttcaaggcaggatctcactgtgttgcccaggctggagtgcagtggcatgatcatagctcactgcagcctcgacctcctaggctcaagcaatcctcccaacttagcctccccagcagctgggactacaggcaggccaccaccaggtccagctaattttgttttttttaagagaggatgtctcactatgttgcccaggctggtcccaaactcctgggcttaagagatccttcctcctcggcctcccaaggtgctgagattacaggtgtgagccactacacaagacccgagaagggctttttcaagagggaaaagcacttgcaaaagtgcagaggaagagcatagaacattctctggccggggaagatgaggaaggtgaagccagtatagcgggcagggggtgaagaggaggggcagatacaggtggagagcaatggggctgcaaagctgcctggtgtccatctcctccagagaagagaggggctggtcccccaaactcagggggaggcatgtggcagatgctggagtgtgggggacactgagacagggaacagggggcctgggaggcttgtgtctctccccacacctcagtttacccgtctgtgacatgggcagtgtgggcctctagtctgagcacaactttctctttggacatgaaaactatagagttcatactgtgtcatcagtgggtccctcctgtccccatccagtgcccagtgccatacactggggtgccccaaggacatgccagggcctgggccaggctgggggcttctgcctccactccatggtgcagaacaaggcttggggagtgtggaggtggctggggagccctgggcccccggagggctgctctgtttaccggaggccacccgcccacctctgatgcaacaggcaggctctggttacgtgaggccggcagctgggccagctctgggggaagggctagcccagcagagcgaagctggctggggctggcccttatgcaccccaactccccagccccctccttctggtgggcaccatcttgttattcatggtctgtcccgtgtccttttgcctctgttcctatcctataccttccccaaccactaattgtgtcccctagcagggccaccaagagtcttaacctcattcttctcagatgaagggacacccttagttgctagagtaagaggttggaaggtagaagggaaggttgtgaggaggaagggatagaagggtccagagtgggtggtgagggagaagagtgacctgggaagcaggtctgggagatgggggaggtggtgggtgggggatggaggagaaggctagggtgggaggctgggggaggtggagaagctgcccccgctgtctccctcctccagattctctcccctctcccaggagaaggctttgaaggaccttccatgataaggatgtgtgacccagtaggtagggagggccctgaggttaaagaaccctgagtccccatcccagctgtgccgcccactcactgtgtgacctcaggatggtcactgcaccccttggggcctctttgctcatatgagaagtgtggataggctgggcgcggtggctcacgcctgtaatcccagcactttgggaggccgaggtgggtggatcccgaggtcaggagatcgagaccatcctcactaacacggtgaaaccccgtctctactgaaaatacaaaaaattagccaggcgtggtggcaggcgcctgtagtcccagctactcgggaggctgaggcaggagaatggcgtgaacctgggaggcggagcttgcagtgagccaagatcgtgccactgcactccaacctgggcgacagagcgagactctgtctcgaaaaaaaaaagaaaaaaaaaaaagccaggcatggtggcacacacctgtaatcccagctactcaggaggctgaggcaggagaattgcttgaacccgggaggtggaggttgcagtgagccaagatcacgccactgtactccagcctgggtgacaagagcaagactctgtctcaaaaaagaaaaaaaaaaaaaaaaaaagaagaagtggggataataggagcccttaaggcccacctccaatgttccctcctccaaaagccttcctatcctcttaccacttaggatccttccacctccccacccttccttccagcttagcactgatccagggggcggggtagagtatgtggctggttctgtgtcccccagcctgggggttccttgggcccgggcccagtgcatggtggcaccaaaggggtgtctccacgggtttctttcttttcattttttagagacagagttgctctgttgcccaggctggagtgcagtggtacaatcatggctcactgcagccttgaactcctgggctcaagtgatcctctcgcttccatctaccaagtagctgggactataggaatgcactaccacacctggctaatttttaaatttttttttgaggtgcactgggtgtctcgcttgttgcccaggctggtctcgaactcctgggcttaagcgatcctcctgccttggcctccaaaagagctaggattatggatatgagccattgcgcacagcctccatgggtttcttgaagaactggagaatctcaaagaaggtctaagcagtgaaagggagtgggggataagcctggggcacccagaagccttgttcagggatactgtagggaaaagaaaaaaaaaaaaaaaggctttccaggggcctgagtgtgcaggactctccgggaacccagaggagtaggtctgaaataaaaaccaggactcacaccaatggctaaggacaaaaacccagcggaagtctgattcttgtcctgaccactgtggacggagcagggggcaggtcgctgccctgtatgggtctccttttaccccatctgcagatcagggttgggatcctttctgggtgatctccagcctcgtgagcactatgcttctgtttggatgccccatggcacggagagctcactgtctctcttctagctgcctatctctggagttctgccgggagttaaattttttttttttttttttttgagacggagtctggctctgtcgccaggctggagtgcagtggcgcaatctcggctcactgcaatctccacctcccgggttcaagtcattctgctgcctcagcctcccgagtagctaggattacaggtgctcaccacagccagctaatttttgtatttttagtagagatggggtttcaccatgttggccacgacggtctcaatctcctgacctcgtaatccacccgcctcgggctcccaaagtgctgggattacaggcgtgacccaccatgcccagctgggtgttttttgaaatggagtctacctctgtcgcccacgctggagtgcagtggcgtgatctcggctcactgcaacctccacctcccgggctcaagcgattctcctgcctcagcctccagagtagctggggattacaggcatgcaccacacccagctaatttttgtattttcagtagagacgaggtttcatcatgttggccaggctggtctccaactcctgacgtcaagtgatccgcccacctcggcctccgaaagcgctgggattacaggtgtgagcccccgcgcctggccagtaaatgctattgagtgagctctaggagtgcccttgctctccaccctgacaagggaggctgcgagctcttgttctgagagccctctggcctctcagaacctcagtttgctctctgaaaaatgggagcgagggcatatagggtgaaaaagggtggagggtcacagtgtgcccaccagggccagccaggactgcagacaatgaccgctaggaggctgaacttcccgccaacgctttgcctcttgcgccccctggcggctagagtgggcggggcgccctccaggcaaaaagggctatcgagcattcaaatgagatgcaaattaaccagcgcccccacaagcccttggactcggggtgacgaggtgtctgacaacccagagtcttgatcagatcccttttatctatttatttatttattattttttgagacagagtctcgctctgtcacccaggctagagtgtagtggctccatcttggctcactgcaacctctgcctcccgggttcaagcaattctcctgcctcagcttcccaagtagctgggattagaggcgcgcaccaccacacccggctaattttttatatttttggtagagacagggtttcaccatattggtcaggctggtcttgaacccctaacctcaggtgatctgcccacctcagcctcccaaagtgctgggattacaggcgtgagccaccatgctcagctattttgtttttttatagagacagggtctctccatgttgccaggctggtctccaactcctggactcaggggttcctctagtcttgacttcccaaagtgctgggattacaagcgtgtgccaccgcacccggcctagactccttttaagagatgactgggctgggcacggtggctcacacctgtaatctcagcactttgggagaacgaggtcaggagttcaagaccagtctggccaagatggtgaaaccccgtctctactaaaactacaaaaattagttgggcgcagtggcaggtgcctataatcccagctattctggaggctgaggtaggagaatggcttgaacccaggcggcagaggttattgtgagccgagatcgcgccactgcactccagcctgggcgagagtgaggctccagctcaaaaaaaaaagagagagagatgactgttagtcgctggttgaggttgcatccaggggctatgagtgactcagagccctagaagggtctggtggggccccccacacctgcctccctcacccctagctcctagcgccccagacatcctaggcaggtcctgggaggcaggcaataatcccattctgctgccagtttgtcctgaaggtctgagcaagagggctggctcacaaataccagtgtttgctggagaaatggtcgcacgaaggacagatggacattgagaggtgccttcagagcaggtaagaagggagaaggactctggaggccacacaccaatcagtgccctaaatggggtggctttaggctcctccccactcctaagctgagtaggacagtggagaggtgggataatggcacagaggccccccagtgtgacctagaaggaggagaggtagggctgaaccccctttccaggccttcagatgccttgacaggcccgatgtcctaacaggatgccctctgtctcccctcgggacacccctgctcttcccatccgtctccatcaaccaccccacagtgccaagctgagggaccctcccagagcagtgactggaacctgcctcgaccccaaacaactcttatctgacctccctaatacattgtactggaacaagggattctggggtaactgcattggcacacagctggccttggagatgcataacttgtggaggcctggtcacccaggcttggcattcacagtggtcagtgcaggcccttctgcaaacagcagcagaaacggactcaaagccattttggcaaaaatcataatttaggggtccatgaaactgaagaaatgaaattggctagtgtcaggtacagttggatccagggctccacacaatgttctcaggtccccccggaacccctcgccccggcctggttcccatacacccagctcaaccttcctgatgctcctggtagaactcccaggaaaggtcgctcattgggtcacgtgtccatctcaaaccaatcactaggaacctaggacaagggagctctgattggccaggccgaggtgccacatccaccactggaactaggggtggcttctccatgtggcctgagcctggggtgggcgttgctgcttgaggcagaatgcaggttgggagggtagatctgcgaatgtccaactcagcctgtagagaaggtgcagtccagccttccttatccagatgaagaaagggagaaccaaggctgggtgcggtggctcacacctataatcccagcactttgggaggctgaggcgggaggatcacgagctcaggagtttgagaccagcctagccaacatggtgaaaccccgtctctacaaaaaatacaaaaaattagctgggggtagtggtgtgcgcctgtagtcccagctacttgggaggctgagacaggaggatcacttgagcccaggaggcagaggttgcagtgagccgagatcgtgccactgcactccagcctggatgacagccagatcctgtcaaaagaaagaaagaaagaaggaaggaaggaaggaaggaaggaaggaaggaaggaaggaaggaaggaaggaagagaaaagaaaagaaaagaaaagaaaagaaaagaaaagaaaagaaaagaaaagaaaagaaaggaagaaagaaagggagacccagagagggccagcaccaggcctatgtcacacagcacatcagaggcaggcagggctgggaccaaaccaagccgggctctgctcttctctgactgtgccctttttttttttggttggggggcggcgggtgcgaagtctcgctctgtcgcgcaggctggagtgcagtggcgccatcttggctcactggaacctctgcctcctgggttcaagcgattctcatgcctcaacctcctgagtagctgggattacaggtgcccgccatcacacccggcagagcctctttttgtccatatgtatttgggggtgagacctgccttttggggctgaggatgaaatgagatgacccctgtgaagactttagcccagggccagggacttgataggtgcataatcaggattattttgatggcagttattggtccaagggtcgatggggggccagtgagagtccaggagcagcaaagccacttctggacttctgggaacatggacggctgggcctggaggctccgggcaggtgcaggaggaatgctggccacactcgttcagtcttcagtctctgcctggcccagcttcagtcaggctggggagcaggggcaagggccagggtggtctgagagacagacccaaggcatgaggcagcacctgagggatgaccccgggccagactaaggtggagcttggtggtcagaggtccgggtgggaatcctggcatttctgggcgtgggcgatgaccctgagctggctgccttacctctcggggcctcagtttcctcttctgtaaaacagggcagtgcttaaggtcctgggacaggagagggggatgacttgaccctgcgaaggtcactgatgaccccaaagaggcgcagttttgggggaaaagtgggaatgaaagcctctgaggccgggcgcagtggctcatgcctataatcccaggactttgggaggccgaggcgggcagatcacctgaggtcgggagttcgagacctgactgaccaacatgctgaaattccatctctactaaaaatacaaaaattagccgggcgaggtggcaggcacctgtagtcccacctactcgggaggctgaagcgggataatcgcttgaacctgacaggcagaggttacactgaaccgagatcgcaccaccgcactctagcctgggtgacagagtgagactccatctcaaaaaaaaaaaaaagagagaaaaaaaaagcctctgagatgcggcatgaggctggcggttccagggagaggcgaggaactctgcagggacaaacgtggatgagacacagagcaatcctgccgggcagcagcagcggaggggacagcagacgctgggaagtgaggagggcagcggggcagtgtcctcgaggcacaaagtaggagggaccagggtgtgggggatgggactggggagacagaggctgggttgggggtgtgggcagggctgcgtagggcactgggctgggctgctgacccactcaggcagcccctcctgcttcaggccccctggaaagctcccaggccacccctcagcctgtgggattcctcaccaccccacatccagagctaagcctgctatgaacaggtactcaggaagtatgcatcaactgccagaggtactcagtaaatgcttgctgcctgtggtgtccagtaagcgctcactgattgactacagtgcccactaagtgctctctgactgcacacatgaattcggctgcctctgggctctggggctacagcttgaaaggcctacagaggctctgtctccacctgcctcccctcgacctctgagagggcttccatggcacatggcaccgaggacaatcacagtgcctggccaataggcaggggctcggtaagtccccagggcccctttgacctgcctgcgtctgcccatcacagatatagaatggtgacacatcagatctttcctggcaccacactctctaagcgtggtcagccacacctcccacagctcacgctgcacttgtgcggtcctctcccatctggtcctgggcctggccacgtgactggcctcaacggatgggccacccacaaatgtgaaaccagcactctgcatgggagccgctctcctggctcccagccaccaggagaaacccgggctggcctgctggagaggccatgaggaaaatctgacccctgctgccaacagtcctggccaagggaccccctgactatgcaggtgcagctgagctcccatgagcaccacatgggtgagccccagggacagcagcagaaccacccagctgagcccagcccaaagtgcagaatcatgagtaggttaattactggggctgtaaaccactgttttgggatgctgtgttatgcagcaatagccgactgctccaaagcacatccgtcactgtgccctgcaccctcttggtcacctgagagccacctttacagaaagtaaatgcagagaccagagagggtagtgaatttgctcggtcacacagcaggtaggcagtagatgggtggggaggtcccagagataggtgggtaattgcccatgccgggctctgcctgagagactgtgcacgggtaaagcaggctgctggcacgtggtaggatagaggaaatgtgggctcccttctctgtcttggggggtggaaatctctgggactagcatggggcctatggcctggaaaagagagaggaaggtggtggagagagagtgggagagatgggctgacatggtccctgagcagcagggtggaacattctggacctgcagacacccctccacctgccacctccgaaatcatcccacaagcccagtgagaaaccccaagtggttagacaagcaggtgcctgcctggctgccaagcgggcgggttggttagttcagagcagagagagaggctcgtggctaccctcggcactgacctgggttggcggaggctggggggccccgagtctcttccaggatcaggctgaggagggcgggggtggttcctccgggctgcaacaaaacatgtgcagcatccatgaggccaaggtcagaggccacaaggcttgctcagctggctggagtgtatgtttgggtgatactctggtctcaaagacctctggcttgagcttctggggcatcctgcttaaaagtgggatgagtgggccaggaacggtggctcacgcctgtaatcccagcactttgggaggctgaggtgggtggatcacctgaggtcaggagttcaagaccagcctggccaacatggcgaaaccccgtctctactaaaaatacaaaaattagccaggtgtggtggcaggcgcctgtaatcccagctactcgagaggctgaggcacgagaatcacttggaacccagagagggaggctggagtgagctaagatcgcaccagtgcactctagcctgggcgacaaagtgaggctctgtcttgaaaaaaaaaaaaagggacaaatggctgggcccagtgggtcacacctgtaatcccagcactttgggaggctgaggcgagagaattgcttgagcccaggggtttgagaccagcccagggaatgtatcatgaccccatctctatttaaagaaatatatatgtatgtttttaaaagtgggacaaggcactccagaggccacgtctgcaactcactcacacaagactgggcacttcaaacccacagggcttacaaagagaggtgtcagcagcaactcaagctgctactaatatctttcaggagtgtgttgcgtttttgaaacagcaggcacaaacagggcatatgaaagcatttttggaaaccctgagttgacagtaagagctatggcttttcagtgaagtctagatccaactgccaatgccaacccatggcagagaagccagatgccgctcctcttcagatgcaagagagcccagataaacccttcatgctaccgtttgagggaagattgctacactcccattcttacacatacactcaagtcttgtttctgcaattttcgcgtcttagttaagcaacacagatgctttctttcttttgcccagtgggggacaggcctgccagaaccccaatctgtgggagccagacgcatcccaaggcgacattcctgctcctggcacatgagtgtgtgttcataagcgtgtttattaacttagaatgccaacaaaaacaaaaagaagggctactcttcaaaaattctctttccaatgttcaaggactgtgagtgcttttcgttttcagacccctggtcctgggcttaaagcctcccttggctctgggtcctgggacagggagaggcccctgccatctccctggccccatctcccccagctggccggctccagccacagaagccttctcggtgcttctcgaacactcccagggatcccagccccagagcgtctgccctcaccactgccccacatggaactccgtctgcccccggatcgtctctgtctgcatgtaactcatgccacctcctaggaggggccccgcagtgttcttcacagcgcatctgacatgctcttgtctgccatgtttacctggttgtcgtatgtctccttgtgagcctgtctgtctcggtcactgctatgtccccagtgcccagcccagggccaggcacacagcagagcgcaggacctcggtattaagtgactgaactcaggttatagatgccacaggacaagaggaggtcaccagacaccaggacaaaaggaaagagacagttttctaataagcgagaagcagcggttcccagcgcagctgagagacggtccttgcagctgggagtggcagtgggggcgggcggtcccaggagctacctgtggccctgggcactggcattcatatggtcccggatgctgatggcctgtttgagcagaccctccacgctgcggaagtagacgctgctgtccaccaggttcttcacggcgctgaaacgggaggacaggcctggtcagcgctccggacctgcaggtaactgtcccacaccccagcacttgaggtcaccaccagggctcggtgggtacctcagtgattctgcgggcttcccgaaggactcacagtgggcttacattttagatttccctgctatgactagatgacatctgtgcaacacagcacattctctgccactgaaacatctaatgttttgaaggagggatcagtgtataaagatgtcataaaaaatatctcggccattactgctgataatgggggtgtaaaaaataggaaagaaaaaacacctgggcactgtggttcacacctataatcccagctactcaagaggccaaggcaagaggatggcttgagcccaggaggttgagaccagcctgggcaacacagcgagaccccatctcttaaaaagaaaaatctgggatgggcgcagtggatcatgcctgtaatcccagcactctgggaggctgaggcgggtggatcatgaggtcgggaggtcaagaccatgctggctaacaaggtgaaacctctgtctctactaaaaatacaaaaaaattagccgggcgtggtggcggccgcctgtagtcccagctactcgggaggctgaggcaggagaatggcatgaacctgggaggcagagcttgcagtgggctgagatcgcgccactgcactccagcctgggcgacagagcgagactccgtctcaaaaaaaaaaaaaaaatatacatttcactacagacaaatgttcgctggcctcccgcctagcccagtggtatctggggcaacttctgtggtgatgaaaatgttctttatccattgagatggctgagaggcacctggaatgtggctagcgggacttgggagctgaatattttttttctttctttttttttttttgagacggaatttcgctcttgttgcccaggctggagtgcaatggtgtgatctcggctcactgcaacctccgcctcccaggttcaagcaattctcctgcctcagcctcccaagtagctgggattacaggtgcccaccaccacacctggctaatttttgtacttttagtacatgttggtcaggctggtctcaaactcctgacctcaggggatcctcctgcctcggcctccaaaagtgctgggattacaggcgtgagccactgcgctcagcctcattttgtaatttttttttaatttttaatttttttttttgagacaaagtctcactttgttgcccagactgagcacaatctcagctcacagcaacctccgtctcccaggttcaagcgattctcctgcctccgcctcccaagtagctgggattacaggtgcccaccaccacacctggctaatttttgtatttttagtagagatagggttgcaccatgttggccaggctggtcttaactcctgccgcaagtgatctgcccacctcggcctcccaaagtgctgggattactggcgtgagtcactgcacccagtttcattttaacgagttaaaattgaagtgtgcttagccacccatggcgtaggttcctggattagatggcacagctagaggaagcagaagaaagcataggttttttgttggtttttttttttcctttcttttttttttttttttttgagacggagtctcgctctgtcgcccaggctggagtgcaatggcgtgatctcggctcactgcaagctccacctcccgggttcatgccattctcctgcctcagcctcccacgtagctgggactacaggtgccaccacacctggctaatttttttgtatttttagtaaagacgcggtttcaccgtgttagccaggatggtctcgatctcctgagctcatgatccgcctgccttggcctcccaaagtgctgggattacaggtgtgagccaccgcgcccggtctgttttttgtttttttgagacaggatcttgttctgttgcccaggctggagtgcagtggtgcaatctccactcactgcagcctcaacctcccaggcttaagcaatcctcccacctcagcatcccgagtagctgggactagaggtgtgtgccaccaggctcggctagtttttgtattttttgtaggaatagggtttcaccaggttgcccagactggtctcaaactcctgggctgaagtgatcctcccacctcagactcccaaagcactgggagtacaggcgtaagcccctgcacccggccgtatttctttcttctttagaggagaggtctggctatatcacgcaggctgaccctgaactcctttcaaggcatcctcccacctcagcctcctgagtagctggaactataggcgtgcataaccattcccagctctagcaactcctatttcttttcttttccttgagctaaggaagatactgtctgtctggtcaacccttgtcccaccaagggggccaaggctgccaatggcagaatactgccccagcagcaggatttcttgtctaggcaccttcgcccacacaaccaaacagcaacacaccaagggaactgctgggagcatcattcagccgccaataaaatggcccacagcccatgtcaggtgcaaacagcatgtctgtgcaaagtcgaggaacttccaaggccaactgggcaacccgaggcaaccggaataaggcttgggaatacagtcacgaggaatggaaccaaagcacaggaggcaaggggtcagtaacaaaaagaaacaccggccaggcgtggtggctcgcatctgtaatctgagcactttgggaggctgaggtgggtagatcacctgaggtcagaagtttgagaccagcctggccaacatggcgaaaccccatctctgctaaaaatacaaaaattagccgggcaaggtggcgggcgcctgtagtcccagctactcgggaggctgaagcgggagaactgcttggacttgagaggcggacgttgcagtgaactgagatcatgccactgcactccagcctgggtgacagagtaagattctgtctcaaaaaaaatttaaaaataaacagccatatctgtgctttgggcttccccctggctgccatccaccccactggcccatctgtcctggctgtgggagagaaatgctggtccccagaggcatcttccagaatccctatccctctttcctgtggcagctggggaggggctcagcacagggaagagacccacctggggccctggccaagtgaatcgtggtacagaccccatacacccactcgggtaggcctggcagggtggggcttactgggcagttggctgggatgcccctgaatgcccaggaggccagagcagcaaaaggtggccctgcagcggggaggctgtggcgctcacctgcaggcgtactccacagtgtagatggctccctggctctgctcctcccaacgctgcatgtctgcctgtagggggcgcaggagatatttggcaagggaggccacccccacctagagggccttcctcccagctctcttggttggggctctcctgagtcctcatggtggaagcagagacctttcctcctgcaactcccttccctcacaggtctgggctttctgtgaacacctggccaccatgcctcagggcctttgcacaggctgttccccctgcctggcacatccttcccttagatagtcagacggctgcctccttgccatgcaggtcataactgtaacagaatagtatagtttgactgtgtccccacccaaatctcaccttgaattgtagttcccataatccccatgtgttgtgagagggaccaggtggagacaactgaatcatagaggtggttcccctcatcctgttctcctgataagtgagttctcacgagatcttgtggttttaataaggggcctcccccttcactgggcactcatacttctccttcttgctgccatgtgaggaagtacatgtttgcttccccttctgccatgattctaagtttcctgaggcctccccagccctgttgaactgtgagtcaattaaacctctttataaattacccagtcttggctatgtcctgatagcagcatgagaatgaactaatacacacatcttgccatctccttcaaaatctatcccagatctgtccaccacgcctctgacctggctttgccaccacatgcctccttgctggtgtcccagccttgactcctgccctgacagcccctgctcctcccagcaggccccagctcaccttgtgctgggccagctcggggagggagcgacgcacatgctcctgcagccggtacagggccacggatggctcgttggccaggacgtagacgctctcagtgaacttgtccgtgactagatacaggtggtagggatggggcgggtgtggggagacaaagcgtcagcctcctcattgctcaagtgttgagcccagccagagcaaagggggcatctggcgtgtccctccgcagctaggtcactcctggcccatgacaggctggaggaagtggtcacagcagggctcactcaagaggacattaatgagaccgggtgcggtggctcacgcctgtaatcctagcactttggaggctgaggtgggcagatcacctgaggtcaggaattcaagaccagccaggccatcatggtaaaacccatctctactaaaaatacaaaaattagccaggcatgatggcgggcgcctgtagtcccagctattctggaggctgaggcaggagaaatcacttgaatctgggaggtggaggttgcagtgagctgacgtcatgccattgcactccagcctgggcaacaagagcaaaactccatctcaaaaaaaaaaaaagaggacattaatgagaggacataatgagtgatgagttcataacgagtaaacttcttttttttttttttgagacagagtcttgctctgtcatcaggctggagtgcagtggtgcaatctcggctcaccacaacctccgactccctggttcaagtgattctcctgcctcagcctcctgagtagctgggattacaggcatgcaccaccacgcccagctaatttttgtatttttagtggagacagggtttcaccatgttggtcaggatggtctcgatctcctgacctcgtgatccgctcaccatggcctcccaaagtgctgggattacaggcttgagccaccgcgcctggccagcttgattgaactttttttttagagacagggtctcgctctgttgcccaggctggagtgcagtggtgtgatcacagctcactgcaccctcgaaactcccagcctcaaggcatcatcacgcctcagcctcccgaggagctagaactacaggtgcaaaccaccatgcctggctagttttttcatttatttatttatttatttattattattttgagatggagtctcactctgtcgcccaggctggagtgtagtggggcaatcttggctcactgcaagctccacctcctgggttcacgtcattctcccggctcagcctcccgcgtagctgggactacaggcacccgccaccacgcccggctaactttttgtattttttagtagagacggggtttcactgtgttaccaggatggtctcgatctcctgacctcgtgatccgcctgcctcgggctccaaagtgctgggattacaggcatgagccaccgcgcccggctcattttttaaaatagagacaaggtcttgctatgtggcccaggctggtcctgaactcttggtctcaagtgatcctcctgcctcagcctcccaaagtgctgggattataggcatgagccactgtgcctggcccccagtgaactcttctcatctttccctcccaaacccaccggtagtggacactgctgcctactgcacttcccggcattctttttgcccccgtgaccacactcgggactcttcagagcatgcccacaggacctgaaagtgcctggaagttcacatcccaggagggcctcagctgccactcaccagtgagagatatggaaacctgtgtccctcgctgggcactgaacaacccagagcctaacatccccctgggctcctgtgcaggcccaggatgaggcctccctctgcagattttacctgaggtgcccctcgctcagcctcctcaccagccagccctgccctgtttccccttctcccctgcaggtgtctcctgatgaaattttttttttcttgtttttgagacagagtcttgctctgttgtccaggctggagtgcagtagtgtaatctcggctcactgcaacctccacctcccgggttcaggtgattctcctgcctcagcctcccgagtagctgggattacaggcacccgccaccacgcctggctaatttttgtatttttatttgagatggggttttaccatgttggccaggctggtctcgaactcctgacctcaagtgatctgcccacttcggcctcccagagtgctgggattacaggagtgagccaccgcccggccctgataaattaattgcacgcaaatcctcattacagggtctgtttcaacaacggcattcccagccagccagcagggcccgcctttcctgtcccattcttgggcagatcctgatggttccagtctcacctgttctattataccacactgcccgcaccggtccaggcacagcgaggcacggccatctcctgcctggatgccagatccaccttctccctggcctctctgcttcccctgctgccaacagttcaacctccatgcagcacgtgaggcaaactccaaatgaacaaatcatctattcccacccttgctttaaactcttccatagctcccacctgccagagaataaaatccgcctttcttgccctgcatgttctggctgctcttgacctccctgccttccttgccctccacccctggctcttccttggacctcccagcactgcccagaactttctcactgcccgagaggacaaggtaggaggatcacttgaggataagaatttgagaccaacgccgggtgcggtggctcacgcctgtaatcccagcactttggcaggaggatggattcagcctaggagttcaagaccagcctgggagacatggcgaaaccccacctctataaaaaattgcaaaaataagctggtcatggtgatctatacctgtagtcccagctactcaggaggctgaggtgggaggactgcttgggtctgacaagtggaggctgcagtgagccatgatcataccactgcactccagtctgggcaaaagagtgagactctgtcccaaaaaaaaaaaaattaaatgcccgtatgtgaccagttgctcctttattcattacagcagagctctaaacacttggtcacctcaaggcctttgcacttggtattcccacctggagacaccattccgtcactggctctccttcatccctcaggtctgctcaaatgtcacctcctgggcaagaccctccctgactaccaagcttaaaagatgacccctccacctcacggaggaccttggcaggcattttgttcctttctcttaataccaatttcaactgattaggttacatgttcacaggaaaagttaaaagcttggacttgggagagcagagcttctctgagcctcagcttcctcatccacaaaaaaagaataacagcaccagcctcaaagtttgctacagagatgaatccaatgccatcaccagggtgactgctcaggagagagaacccaggcgtgtctgggagtcaaaggaggctaacacaagtctctccatctcaccactgtgccttgagtggcagagcccagcctgccacctccaaactgtgtgacctcttaccagataggcctcctcgctttgaatgtgagcataacggccaggggcggtggcccacgcctgtaattccagaactttgggaggccgaagcgggaggatcacctgaggttgggagttcgacaccagcctgaccaacgtggagaaaccccgtttctactgaaaatacaaaattagccaggcatggtggtgcatgcctgtaatcccagctattcgggaggctgaggcaggagaaacacttgaacccgggaggcggaggttgccgtgagccatgatcacgccattgcactccagccttggcaacaagagcaaaactccgtctcaaataaaaaaaaagaagaagaaaggtgagcataacagacaaggcacggtggctcatgcctcatactcatgccctccgttatccatggttcccgaatctgtggattcaaccaaccgtggatggaaaataggaaaaaaaaaattccacaaagtttcaaaaagcaaaacttcaatctgccctacacgaagcacttctttgaatccatgtgaatgaagtgatgtgtaggcctgtattatgtattctagatgtgagtaatctagggtgatttaaagtataggggattagctgggtgcagtggttcacacctgtaatcccagcactttgggaggccaaggtgggtggatcactcgaggtcaggagttcgagactagcctgagcaacaaggtgaaaccccgtctctactaaaaatacaaaaaaattagctgggcatgggggtgtgtgcctgtaatcctagctactcagggggctgaggttgcagtgagctgagatccccccacggcactccagcctgggtgacagagcgagactccgtcaaaaaaaaaaaaaattaaagaattagcctgatgtggtggtgtgcacttgtagtcccagctactggagaagctgaggcaagaggatcgcccgcgccagagagatcgaggctacagtgagccatgatcgcgccaccgcaccccagcctgggcgacagtgtgataccttgtctcaaaaaaaaaaaaaaaaaaggaaacaagacgcacagcgattactacgccccggggattcttccaatgcattacaaatatcaggttgttgagttttttttttttagacagggtctcacttgtcacccaggctgggggtgcagtggcacgaccgtagcccactgcagtgcagccttgacctcccgggctcaagcaatcctcccaccttagccgcccaagtagctgggaccacaggcgtgcgccaccacgcccggctaatttttgtatttttttagagacgagatctcactatgtcacctaggctggtctcgggctcaagcgatcctcccgcctaggcctcccaaagtgctgggattacaaagccaccactcccagcctcagctactgaattcttgaaacaatcctggggggaccggtaattaaagcagacacggagcctttctacaggtttcaaaactagtcagcggcagagctgggattggacggcagttcaatcactgctcctcgcacggtccctccgcgcccggcctttgtcaggccgcccctccacaagttaccggccccctctgtcccgcccgcaggcccgcaccacctttcttccccttgagctgcatctccggctcctccatagcgaccgcggccgagcgaaccgggaaacggcaccggaagcccggaggttgggacgcccgcctaagccttccctgctgaaaccggacgccgcacggctcctgttccggtgtcagagggcccgccctccccgctcctcagtctttgcggacaagaaaggggctgtgtgagacgcagggaaggaggcacacccgggggtggcgcagtgaggagggggcgcgacggccaggaggctggtggagcgacacccaggcaggagagggggaagaactctctccctttctgaacccccttttccttgagagacgagttgggggagtcctccacgcattacccactcgggccgcaaaaactcccttctttagccctctgcccccgcccttgcttataagcctttgagaccgcagaagggaccttgttgtggaacgggacggccaaggtacgctgcccctttaagttccagacgccccgcgtacttcccctacttcttcttcttgagatagccccgcccatctacccgaagccggagccaattggctccctctggaaaaatctgtgggcagggtaaaggtgagcgggcgcaggcgtagtgaaattctcagagccctttaggccccgcccattccctccgagtcggtgaggaggggaaaagaaggcgcaggcgcaactgccctcccaggaccccagcggaacccacgccctcccctaagtcttaaagggccagaggcagcacttactgcccgggcccttcctcacttttggggggcgggggtgcgcaagcgcagtgggggagctctggggtgggggtagcggtcgagtatcaagttgctttctgtcccggcagaggaagccagatcgctgagggtccggtctccagtttgcctcctgctatatccattggaagagaaaagtttgtgacttgggcccccaagttttgagagaactgggctttcggcgcggggggacagaggaggctcgtggggaggtgagtggacctcctggatcgatttaggaggctcgggtgggactgggaccaatcgcacctttgttgagccgtcactcattatggggagcccctcccaacaaccatagcgaatatttattgagctccacgcttagcagatcccccgataagctatgtacagacataattcgttgtaggtctcatttccacattttgtcgtggaggaaactgaggctcaaaggttaagtcacgtgcccaagttctcacggcctataaattgagggattcgaacccagacagctgaccccagagccccggcttttttttcctttcttttttttttttttttttttttttgagacagagtcttgctctgtcgccccagctacagtgcagtggtgcgatctctgctcaccgcaacctccacctcccgagttcaagcaattctgcctcagcctcccgagtagctgggatcacaggcgcccgccaccgcgcttggctaatttttgtatttttagtacagatggggtttcaccatggtggccagcctggtctcgaactcctgacctcatgatccaccctcctcggcctcccaaagtgctgggattacagccgtgagccactgtgccctgccagagcccaggctcttaaacattgcacattgtaggtgctttggtggtggggaatggtagacctcgaaagcagttggactctggttttcatttccctggctctggtaattaacctggacctcagtttacccaccctcacagtgcaaggctaggtatgcagtcggtgcctactttattataactgttgataattattgtcatctctccccttctgacacctccgccagctttccccatggagcttacccagcctgcagaagacctcatccagacccagcagacccctgcctcagaacttggggaccctgaagaccccggagaggaggctgcagatggctcagacactgtggtcctcagtctctttccctgcacccctgagcctgtgaatcctgaaccggatgccagtgtttcctctccacagggtaggatacctcctctgggattagccctctgggattccatgatgatggaatgtcaggcctcacatggaacctgtgtcttgctttcgtttttgttttgttttgttttgttgttttttgagatggagttttgctcttgttgcccatgctggagtgcaatggcgtgatctcagctcactgcaacctctgcctcctgggttcaactgattctcctgtctcagcctcctgagtagctgggattacaggcttccgccactacgcccagctaattttttgggtatttttagtagagacggggtttcaccatgttggccaggctggtcttgaactcctgacctcaggtgatccgcccacctcggcctcccaaagtgctgggattacaggcatgagccactgtgcccggcctgtttttgttttttgatacagggtctcgctctgttactaaggctggagtgcagtgatgcaatcatagttcactgcagcctcaacttcctgggctgaagccatcactcagcctccctaggagctgggactataggcatgcaaccacacctggctaattttttttttttttttgggaggctggtctccacctcctgggctcaagtgatctgcaggcctccacttccgaaagtgctgggattacaggtgtgagccacagtgcccggcccttcacacctgtttttaactctttgagggtagatagctaggagtgaaattactgggtcagatggtcatcctgttttacttactgaggaactgaggatttatttttgattggagtccaagaatatgcctaatttagttccctcccacgacctttgttgctgccactcctgtctggaatgctcttcctacacttcttcctatagctgactcccctcccctccctcccttcccgcctccgttttttttttctttctttctttctttttttgagatggagtctcgctctgtcgcccaggctggagtgcatggagtgcagtggcgcaatcttggctcactgcaagctccacctcccgtgttcacgccattctcctgcttcagcctcccgagtagctgggactacagtccgtttttttttttttttttaaatggaggtttgcttttgttgcccaggctccctcccctcccctcgcctcccctcccctcctttcccctctccccactctcgagacgcctcctggatcccctctcttcttgagacagaatcttgctctgttgtccagggtggagtgcagtggcactatcttgactcactgcaactccctctcctgggttaaggtgattctcctgcctcagcctcccaagtagctggcatgcaccaccacatccagctaatttttgtgtttttagtagagatggagttttgccatgttgcccaggctggtctcgaactcctgacctcaggtgattgcccgcctcggcctcccaaagtgctgggattacaggcgtgagccaccgcgcccagtccctgtagcggatttctttgacttcctaagatctcggtggtgtcaccttggggaggccctcctgttaccaccttgtctaagaaggacttattccttgtgctccgttcttttcatcctcttctacctgcttttaaatttttttttttttttttttttttgagatggagtctcactcttgttgcccaggctggagtgcagtggcgtgatctctctcactgcaacctccacctcctggattcaagcgattctcctgcctcagcctcccgagtagctgggattacaggcatctgccaccatgcatggctaattttgtgtttttagtagaggtggaatttcaccatgttagtcaggctggtctcaaactcctgacctcaggtgatccacccacctcagcctcccaaagtgctgggattacaggcatgagccactgtgcccggccttaagttcttttgaacacttatttcaacttgaagttttttattatttctctatgtctgatgcacctacttgacccccgactccctagagggcaaaaactatgtcttgtttgctcagaacattgccaggcagggaggagaaagatgcaccctgggtattcaagagagtagagtgagtgaatggtggagtcccaggcactgcctttggtagctccaagaccccagggagataccgaaggcagtagcatggtagctcatgcctgtaatcccagcactttgggaggccacggcaggagaattgcttgagcccaggagtttgagaccagcctgggcgacagagcaagactccatctctaccaatatatatatatttttaatttgctgggtatggtggcacctgtagtttcagctgctcaggaggctgaggtgggaggttggcttgagcccaggaggttgaggctgaagtgaactgtgatcacaccaccgcactccagcctggacaacagagcaagactctgtctcaaaaaaaaaaaaaaccccaatagctgggtgtggtggctcatgcctataatcccagcactttgggaggctgaggcaggtggatgatttgaggtcaggagtttgaaattagcctggccaacatagcgaaaccccgtctctacttaaaatacaaaaattagccaggtgtggtggtgggcgcctatgatcccagctactcgggaggctgaggcacaagaatcgcttgaacccaggaggcagaggttgcagtgagccgagatcacgccactgtactccagcctgggggacagacggagactccatctcaaacaacaacagcaacaaaaaaaaacagatgggcttctgtcctgaagcctcagagacatctactgaggggaaactgacgcctgttgtctgtttcccagcaggcagctccctgaagcactccaccactctcaccaaccggcagcgagggaacgaggtgtcagctctgccggccaccctagactgtgagtgggcccacggtccccaacaaggagaggagtaggagggtgggagggcctgtgaggagcaatcgtggacagagggtaaactgaggcacagagaagcaaggggatgagtgaggactctgcctctgtcctgccccagccctgtccatccaccagctcgcagcacagggggagctggaccagctgaaggagcatttgcggaaaggtgcgtgtccacacacatgtgctggcatgtctgcacctggctggtgtgtgcatatgggtgtccatacccactcatgacgtgacctgtgagtgtccacgtgtatgattgtatctaactgtgtgtgtgaccgtgttcatgtatgtccatcaacatacgctccccctcattcccctgtctaaccccagccccccacctcgtccccatttggcagcactggggatagggggcaggggtgcagcctggtggtattgcccgcctcctcctgccaggtgacaacctcgtcaacaagccagacgagcgcggcttcacccccctcatctgggcctccgcctttggagagattgagaccgttcgcttcctgctggagtgggtgcgtcccagcccagctgggcagctggggggttcccgggggccttagggtgggctggggttttggctgtgtctgctggcgccttgtctttgagatgcggctgctggctgggtgcagtggctcatgcctgtaatcccagcactttgggaggccgaggcgggtggatcacttgaggtcaggagttcaagaccagcccggccaacatgggtgaaaccctgtctctactaaaaaaatacaaaaattagccaggcgtcgtggtgggtgcctgtaatcccaggtactctggaggctgaggtgggagaactgtgtgaacctgggaggcggaggtagcagtgagccgagattgcgccactgcactccagcctgggcaacagagcaagactctatctccaaaaaaaaaaaaaaagatgcggctgctgtgggtaccccaggattcctggttatgccccaatccatcctaccactgtcccttcttctccctgcagggtgccgacccccacatcctggcaaaagagcgagagagcgccctgtcgctggccagcacaggcggctacacagacattgtggggctgctgctggagcgtgacgtggacatcaacatctatgattgggtgagggactgcccatccccaggacctctcagcctcctggccttcattcctgcctcaaatgttcacagagtacttgaaaggtgcaggcctgctctaggtgccgagaacacgagacagccccattcccagcctcacagagcagagctccccatgcagggaaggcagacatggaaacaggcagctgagatgcagtgaactgcgctgcgatggcagatgcacaggtggctacaagagccccatgtgggcaagggaaatcagagaggtcttcctggaggaaggtgtctaagcttgagaccccagaaagtgagatgggcccagtgatgagcaggaggaaccacgttcaactggaggccagagagtacaaggcattttgagaatgaggaagaggtaaacctttggtttctcctgcccctacccacgacagaatggagggacgccactgctgtacgctgtgcgcgggaaccacgtgaaatgcgttgaggccttgctgggtgagtgggagtcgggagtggccctgggggccccagcactccagcgggccctgcgggaatcctgagggcagggagacgcccaagtgttgcttgaagagttcttggagcaggtagtccctgcctgctcttctcggaggatggatcagaggggaggaggtggtaggaccacacgggagtcggggtctgggtttaggatctggccaagaggctaagcacctccatcctccatggttcagagacccttcagccacgttcttcagtggagaccaagatagcagaggttggacccttgtcaaaggccacatgggcaacgggcagacccacggctgcattgtggggaatgaggggtgccatgggatctcccaggtccccagaccccattctggactcccaggccccaccctccagcgccctcccctctcctttgcagcccgaggcgctgacctcaccaccgaagccgactctggctacaccccgatggaccttgccgtggccctgggataccggaaaggtcagcctgagacacacagagcaggggtggggtcccttccataggcagggtgaccataaaggggtacatgggacaccccttcagtggtcatacgccggcagcgagagtgtgttgacaggtgttgagcactgctgtgtatcccgcctgggaacatcccagtcctggctcctggggctccacatgtgctggggtagggaggacaatgggtgtcagtggctgtggccatgatgggggacacataggcatgagaggccgaaagaggggcctctcatcaaagagccccaaagtggccaacagaagtcagagaggcttcctggaggaaggtgtcttaaggttgagaccccgagaagtgaggtgggcccagccctgggatggggaggtcagggaaggattctgggggacctgaagggagggagaatggcatccaggtgggaggagtggcccctgcggaggcctggcagtgaggacaccaaggggtaggcgaccaggccatagtgcacagagccacagaggccatccctctccgtggcgggcagtgggtttgaacaggggccataggcagaccccagtttgactccattttctctgtcacaatgggaccccaacttccccatccataaaatggggagatcccaattgaaccgaccccctggggtcatggtagagatggggtgcttaggaaatatccccctccttccttcagagttttactgtgtttgggacagaaatcattcctcttccctcctcatgttttcggggggtttgtttttttgttcgaggcagaaagtcttgctctatcacccaggctggaatgaagtggtgcaggcacagcttactgcagcctcgatctcccaggctcaagtgatcctcccaccacagcctcccgagtagctgggaccacaggcattcgtcaccatgcctggctaattttttgttgttgctttttttttttttttttttggacatggagtctcgcgctgtcacccaggctggagtgcaatggcgccatctcggctcactgcaacttccacctcccaggttcaagcgattctcctgcctcagcctcctgagtagctgggaccacaggtgcacaccatgacgcccggctaatttttatatttttagtagagacggggtttcaccatgttggtcaggctggtcttgaactcctgaccttgtgatccgcctgtgttggcctcccaaagtgctgggattacaggtgtgagccaccacgcctggctgtgttgttgtttttttagaagagacagggtctcgctatgttgcccaggctggtctcaaactcctgggctcaagtgatccttcttccccagcctcctgagtagctgggactacaggcatgtaccactctacccagctaatttttaaaatcttttttatttattttttgagacagagtctcgctctgtcacccaggctggagtgcagtggcacaatctcggctcactgcaacctctgcctcccaggcaaacaattctcctgcctcagcctcctgaatagctgggattacaagtgcctgccaccacacctggctaatttttttttttttttttttttttttttgagatggagtttcgctcttgttgcccaggctggagtgctatggcgtgatctcggctcactgcaacttccgcctcccaggttcaagcaattctcctgcctcagcctcccaagtagctgggattacaggcatgcaccaccatgcccaactaattttttgcatttttagtagagtcagggtttctccatgttggtcaggtgatctcaaactcccgacctcaggtgatccacccgcctcagcttcccaaagtgctgggattacaggcatgagccaccacacccggctgcacctggctaatttttgtagttttagtagagatggggtttcatcatgttggtcaggctggcctttcctgacttcaagtgatccacctaccttggcctcccaaagtgctaggattacaggtgtgagccaccaagcccagcctaatttttaaatttttttggtagagacagcgttttgctctgttgcccaagctggcctcaaattcctgagctcaagcagtcctccccactggacctcccaaagtgctgggattataggtgtgagccaccatgcccaggctcatcttttcatgaaagtcacaattcacacattttgcttggtaggaaatatttttatattaattctgaaaagctacaaaagtgcatttttacaaacttaggggaagttgaggttcctggggtgagtcctcggttctcccagctttgctctgtaatgcaggtctctgcaagggtccctgtttgtcccctaaggggagagcgcaggttggcctgtgcctccaccccactcccgattcaagctcacagcccaccttttccctgccccatctcagtgcaacaggtgatcgagaaccacatcctcaagctcttccagagcaacctggtgcccgctgaccctgagtgaaggccgcctgccggggactcagacactcagggaacaaaatggtcagccagagctggggaaacccagaactgacttcaaaggcagcttctggacaggtggtgggaggggacccttcccaagaggaaccaataaaccttctgtgcagaatgagggactttgctgtgcttcccggagggcttcctggaggagacagcccctagaggtctcacaccttctccccaagcacccgcaggtggtagatgaccacacggccaaaaaagtcagtggcatcctcaaacgtcaccttcagccggtccacttcagcagctggtatggggaaagtgtgagcgtgggcagtcaagggaaactggtgatttctggtttcccacccgcaggcccccaccccttccagacccagctcacactccaccgatgtgggcaacctggggaagctgcaggtccctctaagcctctcacacagaacaggtggtcatcagcaccattttacagaaaaagtggagtcctagaggtcacgtgttcaagatcacacatcagggttcccattcgggtttgggtgagtccaaagcttccagaggcacagaccacccaccccagaagcaggggcaggatatctgaagcgagttgttgtcctcagggtagaaatctacaatcttgtggagagcctgagtgccctgtgaaccttcagcagagaaaggcaatgagtgtctggggtgacccctggaacccctgccacccagggccttctagtaccttccaggcagccccggcgactggagaagccaccctgaaactggatctgcagctgggagacacggatgagctggggaaactccagcgtcacccactgggaggggccctggaagcagacagggaaactgaggcgcaagctcactgcaggcacagagccctgctatgcctgtctcattcacatagttcttggaatggaggggaagaaggaaattcggcacatgttcctttcctggccacccatgagggccccctgacgttctcaaggcatgagatctgaatctgaatcaccctagagatggagggtcgagggaggcgcctcacctggtctgagttccaacatgtctcctcatcctggtcgaaaagatgtttttttccaaactgccgagtgttgcgattcagcactgaactcaccctggaggcaccaggatcaaggcgaagagaggggctgagaccagctctcagctccgcggagggcctgacccccagatctgtccactgagggctcgaccccaggcttagggcctcgccactgcctgtccccacagactcttacctgctcactgtctctggacaaaccaaagagtgggtcatgtcggttccacaagacctcgcagggcttaggattgggcacagccttggttcgaatcccggcgcctcctcaagctacagggcggcgcgatcttggctacgccttggcctgaacgtcctcacctgtaacttgggacgagaaccgccactccctcgcccaccccagtcctaaatgtcgcctcgatcaatcccctgccggaaaatttgggagagaggatcagggaaaccgccaatgcccggaggccaggcctttcacaggaaacagatttcccgcgggtttcgggggcggtggctttttgtgcgaggctgtttctctgcgaatagctcttggagccaaatcttgggacccggaaccgcgtgggcttggcgcatgcgtgttgtaattcaggcgccgaccgcggacgctccagaggtggggtttggttcgaccccgccccttcatgctcgcttcttaaagggcccgggttcgatgattgaatttaccttggttcccttgaagctgtagggaaaaggctggctgcgcgcacggggcgctgtccctcggcgcccgaaggtgtagagcactgattttgactgattttggaatccgaaagacttcctttttttttttttttttttgaggcggagtctcactgtcgcccaggctggagtgcagtggcacgatctccgctcactgcaagctccgccccctgggttcacgccgttctcctgcctcagcctcccaagtagctgggaatacaggcgcccgccaccacgcccggctaatttttcgtatatttagtagagacggggtttcaccgtgttagccagaatggtcttgatctcctgacctcgtgatccagccgccggggcttccaaagtgctgggattacaggcttgagccaccgcgcccggcctttttttttttttttttttgaagtggggtctcactgtcacccaggctggagtacaatggtgggatcgcggctctctgcgacctctgcctcccaggctccagcaatcctcctacccagcttcccgaatagttggaactagtaggcgcgcgccaccacggcaggctattttgtttgtttgtttgtttgtttgttttttggtagagatgaggtttcgccatgttgcccagattggtctcgaactcctgggctcaagtgatccgcccacctcagcctcccaaagtgctgggattacaggcgtaagccaccgcgcccggccagagagacttcctatgacaatgtctttcttcctactctaacctactctaccctaacggctaccctaacctactctaacctactctaccctaaccactaaatgcagcctgggaatccccgaacttcactgcctcccggaggccaaaggcagagttgtggaaaaggccacgatgttgggagtatctgaagtcctcatcaaccctttttgttcttgttgggacagaggagccctggcctccaagtttgtctttcccagaaaatgctgctgggacgtcaaggaaggcttcttggaggagggagcatgcgaggtcgggtgttttttgttgtttctgttttgttttgtttcgagacggagcctcactttgttgcccaggctggagtgcagtggtgtgatctcagctcactgcaacctccgcctcccaggttcaagtgattcccctgcctcagcctcctgagtagctgtgactacaggtgcgcaccactatgcctggctaatttttgtatttttagtagagatggggtttcgctatcttggccaggctggtctcgaactcctaacctcgtgatctgcccgccttggcctcccaaagtgctgggattacaggtgtgagccaccgcacccaggctgtgaggtgggttttgaagcatgaacaggagtttgccaaacaaagcctcagataccaagctgaagatttggttcactgattcactagacacctcctgcaagctctactgtcacactgtcatgtccagccttctgctggatgatgctggggacagcaagaggcctcagctccaggcctgtcccagaggagcccctgatctgggcaagacagaggtagacatagacactcctagccccaagggagagatggggccggaggagcaggggctctacctggaggaagggcttcctgggaaaggggatgttagaactgcaccttaatagggggtcaggcgccaggaattcacaagggtgagaaaatctggagtggggagggtgtcccaggcagggagcttagcataagccaaggcctagttgggtgaaagaccatgaatttgaataaaatatgtggagccacatcctgctgggcccggagcagtcatggaaggtgttggagaaagggcaggacaccatccgttctgcatgaatggagggttccaagacagagcagccactggcaagaggctgttgttcctggctttagctgaatggtctggcagccagcccctttcttcaagggctggaggaatggtccttccggcatcctactagtgtctgctcaaacccaccccaggcagcaggggtgggggctggcggggaaactgggtcaccagcagaaggcctgtctcttcagcccctgcctgccagggctttccgcatttagacagagtctggtgccatccaaacccaacttcgctggtctcagggctggggctggaggtgacaggaaactgtgcccccaacctcacccccggaaggaagttagaaagagcaaggacactggagagcccagatctggttcaaatcctggctggaccactcattggctgtgtgaccttagaaaagcaccttgacctctctgagcctcagtttctcatctgtgaaatggggggaattctattaacggcactgttggaggactctctgggttcttcaggttgacacatagtaacagtagctgactttcactgagagtccaccgtgtgtctgacttgaagccatgttctgtcgccacccattggctcgttaaacctgctgtggctggtccctgtcattcccattttatagctgaggacacatcaacttagccaagtccccccagtgaggatatgcatggctccagggctctccacaccactcctggctttggcatgcggcctccttgcccacgggtatgaggccagctccataccctcttcccgcctcctcaccccactggcgcctgggcatgaaagagcctcctgtttctccagggaattagcagctctgggctcccagcagggcagccaaaagtggtccattcattcgcttgagtgaggaaagactaagagctcccacccccaccccagggaatggggcagggagggctctagaaggtccaaaagcagctcctctggttcacttggggaaactgaggcacagaaaagcaaagtcatttggccaagatcaccaaggggaactgggatgcaaaccccagtctcactctggagttcccctaactgggcttgggttagcatttttctggggagaaattggaggtttagagagagtcagggacttgctggcagtcacacagcaagtttgggtcagtggggactctctgccttggtggtgtctggggaggcagccccacccatgcagaaaacaggtccttctgtccatgatttcattatcctggaacaaggcagggaatggccctcagatagcttcaagcctcagtttccccactgggagatggatgtaaccttttccctaaggtcttagcctggggcatctgcaagggagggtttgatgggattccctgagcctggagacccccatccggcaggtctgggtctgatttatctaccggagcccatcaggacccctctccgaggagacagatgttcacacagtagcagctggggttatgagtcctggtgcagtgcaagcctgggtcccactggaggtgacagtgggagtgggaggggtgtctgggtgtgaaaggattcaggtgggtgtgtatgggagcaccaggagctgcgtgtgtgtggctgttgtaacagtggctgggagggctacagatctcggggttggtggcattggtggtgttggtgtgaacatggttgtgtgctcactacctgtgggtgtgtctgtgactagaaacctggttgggtgtgagcaatgtggggccaacgtaggctctttgctgctggcaggaaggcgaaggtgttgtgggtgtgagcagcagtgggtgtgtttgcatgtggagggacactggtgcagcccagctcatagctttgccttcggttgtggagcaagtgtgacttgtgtgtggcccaggccaggtatggttgtgtgtggcctgaccaggttgattgtgtatgtgattgtgtgtggcccattgtggctgtgcatggctgggtgtggttgtgcatggctgggtgtggttgtgtacggctgggtgtagttgtgcatggctggatgtcgttgtacatggctgagtgtggttgtgtatggctgggtgtggttgtgcatggctgggtgtggttgtacatggctgagtgtggttgtgtatggctgggtgtggttgtgcacgaccaagtgtgattgtgtgtggctgagtgtgattgtatatggccaggtttgcctgtgcatggttggtgaaacctgtgtgtggcccggtgtggttgtgcatgactgggtgtggttgtgtatggctgagtgtggttgtatatggctgggtgtggttgtgtatggctgagtgtggttttatatggctgggtgtggttgtgtatggctggatgtggttgtcattggctgggtgtggttgtgcatggctgggtgtagttgtgcatggctgggtgtggcgtgtatggctgggtgtggttgtgcatggctgggtgtggttgtgtatggctgggtgtggtgtgtatggctgggtgtggttgtacatgaccaggtatgattgtgtatggctgggtgtcattgtgtatggtcaggtttggtcatgtgtggtgggtgagacctgtgtgtggccaggtgaggttgcatgtgagccacctgtgctgttagtgtggctggggtgtggctggggtgtgactgtgtgtgtcagtggttgttggtggcattgtgtgtgacttacccatgtgtcaccttgggcatgttcagaggcactttggaggcactgtccacccctgagacccagctctcttggagggtccagcctccctccccacctctgctctggtctgccagtaccatcccccacccctcccccactggcagcagcccctggcccagggccccagtggggtggtggggacagagaaggcactcagggctggggaggggtgcccaatcccagctcaggcctataaatagctctttgagcccagtagattcccaggcaaggttgcctcattcaagcccccggcaacagcccgcccctgggccccaggccagcccctctaagctcagccctggcaccagcgaggagccggggggtgggggcaaggggtggggaggagtggagaagcgggggaagcagaaggatgaggataggtggggttggggctcagctctgcgcccacagaccttggcttccacctggtctctactcactctgtacatcctcgggcaggtgatcctagctccttaagcctcagtttccccagcacctgtaaaataaacagcagtccctgcctgtgtgtttacttcccatttcattctccaagcaaccggtaacgtagggacattcattatcccccattttatttatttatttatttaattttttcccaagatggaatctcactcagtcacccaggctggaatgcagtggtgccatcttggctcactgcaacctccacctcctgggttcaagcgattgtcctacctcagcctcctgagtagctgggattacaggtgtgcaccaccccacccagctaattttgaattttagtagagacgggatttcaccatgttggccaggctggtctcaaattctgacctcatgatccatctgccttggcctcccaaagtgctgagattacagccttgagccaccgcgcccaccctccccccattttattttattcatttttgaaatagggtctcactgtgtcacccagaccagagtacagtgatgcaatcttgactcactgcagctttaatctcctgggctccagcgatccttccccctcagcctcccgagtagccgggaccacagatgtgtgccaccatgtcctgctaacttttaagttattttttgtagagatgggggtctcactgtgttgctcaggctggtcttgaactcctgggctcaagtgatcctcctgcctctgactcccaaagtgctgggattacaggcatgagccaccggcacctggactatccccatttcagatggggaaactgagacacagaaagatgagatggctcactcagagtcacattgttacgaatggcagggagggggtttgaaccccagacttgtggaggctgagctactcggttctcacgcacgtcacgcagctgttctcagcgtctttcccagtgtgagccacagccaaccccccagcacgctccagcctcaccgactagtcattgcatgctgtttgggtgctgctgacacagctgtcacctgcagacactcacatcagctgggatccttgacctccatctctcctctgtgacacagagtcaaacagtcagtgcagcttcccgctgtatcatcttggaccccagggctaccccttgctcacctggggtccccccttatccctcattcattcctaccctttctttgataatctttttttttttttttgagatggaatcttgctctgacacccaggctggagtgcagtggcacagtctcggttcactgcacgctccgcctcccaggttcaagtgattctcctgcctcagcctcctgagtatctgggattataggtgaacaccaccatgcctggctaatttttgtatttttagtacagacagggtttcaccatgttggctgggctgggctggtctcaaactcctgaccttaggtgatctgcctgcttcagcctcccaaagtgttgggattacaggcatgagccacggtgcttggcctcctttcttcttcttttttctttttttgatggagtctcactctgttgcccaggctggaatgcagtggcccaatttcggctcactgcaacttgcgcctccagggttcaagcgattctcctgcctcagcctcccgagtagctgggattacaggcgtccgccaccacaccctaattttgatttattagagatggggtttcaccatgttggctaggctggtctcgaactcctgacctcaaatgatctgtcctcttggcctcccaaagcgctgggattatgggcgtgagccacggcacctggccaaggcctcctttctttgataaccttgtggaagctatcttgtccctcatttgcctatcctcctaccagatggacacgcaccctcagagatgctaaacacacactcacagatataggacccagggtggagcgctgcgagcccattctcagcacagaaacaccacgaccataggaaggaaggcaggggcaaagcctgccctctctgggcacatttccctcctcatggcttttttttttttttttttttttttgagacggagtctcactctgtcactcaggctggagtgcaatggcatggtctcagctcactgcaacctctgcctcctgggttcaagcgattctcctgcctcagcctcctgagcagctgggattacaggtgtctgccaacacgcctggctaatttttgtatttttaatagggaaagggtttcaccatgttggccaggctggtcttaaactcctgacctcaggtgatccacccgccttggcctcccaaagtgctgggattacaggtgtgagccaccgaacccagccctcattaccatatttttaatggtggtcaaatacagataacataaaactcaccatcttaaaatgtgtaattcaaggccatgcgcggtggctcatgcctgtaatcccagcattttgggatgctgaggcgggcggatcatttgaggccaggagatcgagaccagcctagctgacatggtgaaaccacatctctactaaaaatacaaaaattaactgggtgtggtggcaggtgcctgtaatcccagctattcaggaggctgaggcaggagaatcgcttgaacctgggaggtggaggttgcagtgagccaacatcgtgccactgtactccagcctggatgacggagcaagactccgtctgaaaaaaaaaaaaaaagattggggtctcatgtctcatggcagggacatgcctatgcctctgcataaagcaaaattattcatgtgtcaacagcagtacccagtccatagagtgtgctacataaatgctgatcagacaaaggtgaatgaatgaatgatacaatctggctgtagttgctggaaacagctcgggggtgtcacacacctggactcccaccctgcgtgcctcttaccagctgtgtgaacaaggagtctccccgtctcgtccgtgcctcagtttcctctctgtaaatggggtaaaccagtaattgtagccaaaactgctttgaacgtgagtcctggagaatcaggcagggcgaggttcgaatcccagctctgcctctgtgcgtgaccttgggaagcgactttgcctccttggggctcagtttccccacctgtaaaatgggacggcctcatcctggggcataatggggacgtttaacgcggttcctggggcaaagagaatgggaggagaatcgatgccatcttctcctgggtgcggtgagtgtccaaaaaatgggcggggtggggattttaggcaggggagccccctccctcgcgcagccagaggcctcgggctggcgggggcgcatgcgcagagagccctcgcggcccctttataagcactgaggcggcgctggggccagcggagcgcagggcgcaggggctggacccggcgcggagctggctgagtcggagcgcagcgtcctttgtgcccggcggccgccccgggatgcgtccgagctaggagccaggtgggggatccgtgagggggccgtgttgcgggagaagacttcgggattagagacagagctcaggattagggagaggacctgagaccagggagaagtccccagaatggggagggggctgaagcgggggaggggagccctaggttgaggagggagcgcgaactgggagggggcttgggaatgctaggtgaacagacatttggggaggaaggttgtccgcggaatccggagactaccccccggtggggagggggccgggctgggggtgggtctcagggttgaggagggagcaatgggaaacagggctaggggaggggccccccgagtttggagggaagaagaggacacccagatgccgaatgggggactctggaacagggcacccccgtatctcagccgagacaccccaggattttaagtagggattcccaatttgcggttgaatggaggattccgggccggactgcagtggggagggggcccccagatcaccctgtgcccaatggaagggtatctgcgctgagagcgaacggccatggggaaggggctccctgccatctccctgtccttttgggtcaggtccggtcaccacgttctgactcagggaggaggtcctgggggtccccatcccaacgtggttccccgttattcccttagaccttgggttgaggtgttgtcccttatcccagggaacacactgggtgtcccaggtgaatgttgggtgggggtcccctagaccccccagctatggatccccaggacctgtgagggataccagctcagagggggggctgtcccccagcaccttcacagcctcccacgtccttacagcatgacacagacccctacccccaccccctttagttccacctgtccatatggacacatgtggaagcgctggcttggtttgggggcacaggggctgggaagtaaggggctgggaagtaagggccctgtctgggcaggagagacccccatccctacgcgtggggctttgttcctctcaggcagcatcaatgagaaacagccaggccagggagagggttggctctgggccccagcgggggacgtgggggcagggcaggcaggaaggggtgggtgcactgtgggaccccagaacccagccgtcgcaatagctgatggacattctgaaatcaagttccccctcaaggatatgggggttttgtgtgtgtgtccaccccagacaggcagggagggggagtatgcccaggggttctagggtcccctgtgagtctgatgtgactgtggttgtgtctttgtcagaaaacttgtgccgagggccacatcaccatgtggcaaaatgatgggtgtccatcggtcaccaaggccacaattatccatctcggtttgtgccaggggctggcatcgccgtgtgagtgaggagctatgtctgatgctgttccgttcatcaaggggtttatgtgggggggggggggcccgagactgtgggtgtgtgtctttgtgcagaagacacgccgcctgtcttgtaagtgcccatattgtctctctttgttaatgtcactgtgaatctgtgtgagtgtgtgtttccccagggtctgtgtctggggtgcgtggctgtgtgtgtcccgcttgtgtatctggaggggccaagggttctttccatgcggttggcagtgtgcacccttggcacgggggtgtgggacgtggtctgtgttcagagttggggcgctaacagggaaagcttgagcaggggttgaaatccccaaggggaagcccgggatgatgactgagcccatctccctttctcctccacggagttccacattcacacccatgcacactaatacaccctgactctcaggtcagaaacacacacatgtgcgcacagccccctgctgagggtcactcagactcacacacatccacagatcacactaggtcccatgtgctccacccggtgcacggagctgctgcaggctcacacacacaacatgcacccaccacatggcacaaccgccttcacacccttgccaggacacaacaccccggacacacacccagtcacaaacactcacaaatgcccattggcaaactcaccttcactcagtgctaacggagacttgaggtgggggtgaagtgaaggaggggacacacacacacttacacacacacactcacacacactctctcacacacacacattcacatggatccgagctgcccctcctccagcaccccgcaggcccctgcttgcatatgcatgaggcttgtacattattcatgagggcacgggccccagacagctgtgtaaatgctcatctctggccgccctggggaggaggtattttaagagaagggtgtgggtgtgtgagggtgcgagtggaagggagtgggagggtgtgtgtggggggtgtgcacctgaaactgtgtctgtcaccatgttgggcaacctcagtatatttttagcgtatacatgaggctttgtgtctaaagagctgtttttaaatttaacatttctaggactttgcaagtcttaggtcatttcatcctcacagtagctgcaggtggtacttgctggataatctccattttacaggtggggaaactgaggcacagagagattgaagcagcttgtcccggattagaagcagagctatctggatgtagtctgacctgttaacggggtgtgtgtgtgtgtgtgtgtgtgtgtgtgtgtgtgtgagagagagagagaaagagaattctctggccttgtcctctcgtaaggccctgctgggggcaggtgcaacccggagtcctgtctctctctaatacctggccaggcctggaacagccatgaggggaccccacacttgctcagggttccaaggggaagaaatgagaacagcctggtgaaggcagaggttgctgaggtttacaagttggtagttgggagcactggtccagggtctggctttgacctctaccctgctgtgcagcctgaggcaaacctctagccctctctggtccctgaggcatcgtgttagcaggcaggaggcaggggtggactaggtgggctttgccgctgcgttgccgcctcagagttcagcaccacggacaggtcccaggccggcctcccagcaggggactctgggagctgggaaggagaactggggaaagggacagctgtcacatacagcctccccttctggactccgttcacaccccttcctcagggataatttcttatgggggcggggagcaaggattgggtttgcagatgatgttctaattttccatctgcgcccacctcctgagccctggtgaccggggttcgcaggagtgggaggttttggggagggaccacctccccaggattcctagtctctggaacaatgtgaagtcaggaaatgcactgctgtgtcccaacgactggcatgggctttgctcacagtaggcgcttaataattgtccactttatccctatgggtcctagcccctatagggaaatggacccacaactgaagtttctctgtgggcctaagaagtatctttgttgagctgtgtgaagtcaggaggaggatgggtgggcaggggtgagccccttcctccagctgggagttggcggctcctccaaaatcccagaaaccaagaatagaatcttggtgacaaccaaatcctggaattgaagctgcgaatcgtgtcagccagcaaacccagattaaaggatggcttagaggccagcctgctgcctggactgaggatgctgggaggactgggacagactgctgccctctaggagccgccagtctgatggaggaggctgacttgaaaaatggtatttcagtcttggctgtgttaaggtcggtaataataatagcagcagctaaaatgtaccccttactgcatgagacagttctaagcattttatatgtattgactcatccattcctttcaactacctgatgttatccccatctgacccacaaagaaagtaaggcacagagaaggtaagcaacttgcccaagatcacacaaaaggaacagtgagccaattccagatttgattcactaccagcacccaggcttctgaccacagacttcattgcttggattgttttttgttgttgtgttgtgttttgttttgttttcagtctcgcgctgtcacccaggctggagtgtggtggtggaatcatagctcactgcagccttgaactcctgggctcaagcaatcctcccacctcagcctcctgcatagctgggaccacaggtgtgcgccaccaagcccagataattttttttttttttgagacagagtctcaccctgtcgcccaggctggagtgcagtggcgtgatctcggctcactgcaacctccacctcccgggttcaagtaattctcctgcctcagcctcctgagtagctgggattacaggcgcctgccaccacgcccagctaatttttgtatttttagtagagacggggtttcaccatgttggtaaggctggtctcgaacccctgacctcgtgatccaccctcctcggcctcccaaagtgctaggattacaggcgtgagccaccacgcctggctgctaattttttaaatagaggtaagatctcactatgttgcccaggctggtctcaagcttctggcctcaagcagtcctcccacctcagcctcccaaagtgctggaactataggcgtgagccaccgcgtccagccactgctattctgaggtcaagtggccctgggttcgaattctggctcagccctttgctggctccttctgtgacctagaataacacactggtctctctgagccctggtttcctgatctgtagagtgggggagtttggtcctgcaatgctgaatatctgggagggttgggctgtggctcacccctccctccctctccattttgttccagatccaggatgggggccccgtttgtctgggccttgggccttttgatgctgcagatgctgctctttgtggctggggaacagggtgagttggtttgtggggagggagagattggggtctaggggatggacaagatggggcagcttttgaattccagagccttctcctgctggtctcctggcatgggctagagaataaaatgagaatagattttaaaaggtctttgaacagtcaaaagcgaacaggatacctaagaggttatttttagtcattgtcagcagaagctggagattcccgcctctcatcgttttgctcagatgaactggagagaaagaaagaaagaaatgagaatagtgcagagattgattagtgatgtctgccaagggtggagcgatggaaataaaggtctgtgtccctctactggtggtcaagagcccaggttttagaaatccctcacagatttggtctgtgaccttaggcaagtataattatctctctgaacttcagtttcctcaactccccccaaagagaatgagacattgctactctgcagatggttatgaaaatcaaatgagctgattgctataaagtgcctgttacaaagatggtactctgcaaacaccatttccttttcattagctgtcttttgctttacctttcggaaaaactggggctcagggaaggaaaatgcctctcccagggccatacagtgaatcagtggcactggagtgaaatccctgtccttataaaaataaagtgaggggctaggcacagtggtttatgcctataattctagcactttgggaggctgaggcaggcagatcacttgaggtcaggggttccaggctagcctgcctaacatggtgaaactccgtctctacagaaaatacaaaaattagccaggtgtggtggcacatgcctgtaatcccatcttctcgggaggctgaggcatgagaatcgcttgaacctgggaggcgaaggttgcagtgagccgagatcatgccactccactccagcctgggtgacagagtcagactcaaaaaaataataataaggctgggtgtagtggctcacccctataatcccagaactgtgggaggccaaggtaggtggatcagttgaggtcaggaattggagaccagcctggccaacatggtgaaacccatctctactaaaaatgcaaaaattagccaggcgtggtggcacacacctgtaatcccagctactggggaggctgaggcaggagaattgcttgaacttaggaggcagaggttgcagtgagctgagatcatgccactgcactccagcctgggagatggagcgagactccatctcaaaagtataaataaataaaagaataataataataaggggctgggcacagtggctcatacctataatcccagcactttcgggaggctgaggtgggaggattgcttgagtctaggagcttgaggctgcagtgaatcatgatcatgtcactgcattctaccctgggcgatagagtgagactcaatctctaaaaatagttttttgtttttttttttgagatggagtttcgctcttgttgcccaggctggagtgcaatggtgcgaccttggctcaccgcaacctctgcctcccgggttcaagcgattctcctgcctcagcctcctgagtagctgggattacaggcatgtgccaccacacccagctaattttgtatttttagtaaagacagggtttctccatgttggtcaggctggtttcaaattcctgacctcaggtgatttgcccgccttggtctctcaaagtgctggggttacaggcatgagctatcgcgtccagccactgcttggattctgaggtcaagtggccctaggttcaaattctggctcagcccttttaaaaaattttttaaaagagggaaatagcagtccctgcttggttcttgcctctgaatcaggccctctctccaccttctccaacccaggcacacaggatatcaccgatgccagcgaaagggggctccacatgcagaagctggggtctgggtcagtgcaggctgcgctggcggagctggtggccctgccctgtctctttaccctgcagccacggccaagcgcagcccgagatgcccctcggataaagtggaccaaggtgcggactgcgtcgggccagcgacaggacttgcccatcctggtggccaaggacaatgtcgtgagggtggccaaaagctggcagggacgagtgtcactgccttcctacccccggcgccgagccaacgccacgctacttctggggccactgagggccagtgactctgggctgtaccgctgccaggtggtgaggggcatcgaggatgagcaggacctggtgcccttggaggtgacaggtcagttgggggcaaaggaggggccgggggccggggagagggagggctgagcctggagcccacccactgaatgtcaccttagaaatcactccctgagacctggcctggtgtctcatgcctgtaatcccagcactttggcaggccaaggcgggtggattgcttgagcacaggagttcgagaccagcctgggtaacatggtgaaacctcgtctccacagaaaatacaaaaattagccaggcatggtggcacatgcctgtagtccagctacttgggaggcataggtgggaggatcacttgagactgggaggttgaggctactccactccagcctggatgacagagggagaccctgtcacaaaaaaaaaaaaaaaaaaaaggaaagaaatcactctctgaaccgggattccctttgaattcttctgataaagtcctaaagtctttatggtgcctataatctgagcactttgggaggccgaggcgtgtggatcagttgaggtcaggagtttgagaccagtgtggccaacatggtgaaaccccgtctttaaaaaaaaaaaaaaaaaattagccaggcatggtgatgcatgcctgtgatcccagctacttgggaggctgaggcaggagaactgcttgaacccagaaggtggaggttgcagtgagctgagattgagccactgcactccagcctgggccacaccgcgagactctgtctcaaaagaaaaaaaacgtctgtatcagtatgggtactatcttgtctttaacacctctcttttttagctatgagagaggagtctccagctcagacttctgggggccacaatatctaggcaggatttttgtttgtttgttttgagatggagtctcactcttgttgcccaggctggagtgcagtggtgctatctaagctcactgcatcctccgtctaggcaggattttacttggagtcaattttatggttatctgattttatgtaagacaaaggatactggctttctatttaaaatagaaataaaaaattccttgtaaaataaacttaagtttttttctaagtgaggcaattttttaaaagtaagttaatttaagatgtatattaaatattaagcaagaacaattctcaaatacctgtttaggcaattcttttttttttttttttttttttttgagatgggagtctcgctctgtctcccaggctggagtgcagtggcatgatctcaactcatcgccagctctgcctcccgggttcacaccattctcctgcctcagcctcctgagtagctgggactacaggcgcccgccacagcgcctggctaattttttgtatttttagtagagacggggtttcaccgtgttagccaggatggtcttgatctcctgacctcgtgatctgcccacctcggcctcccaaagtgctaggattaccaggcatgagccaccgcacctggcaaccaattcctttattaaattcttcttgttgagctgcgtgtggtagtgcacacctgtagtttcagcactttgggaggctgaagaggaagggtcacttcagccaggaattcaagaccagcctgggaaacatagcaagaccctgtctctattagaaaaacaaaaacaaacaaacaaacaaaaaacaaaaaacggggatgggggcccagtggctcatgtctgtaatcccagcactttgggagaccaaggcaggagaatcacttaagctcaggagtttgagaccagcctgggcaacatagtgagaccttgtctatacaaaattccaaattccaaaacattagccaggtatgatggtgtgttcctgtagtcttagctactcaggaggctgaggtgggaggattgcttgagtcccaagagatcgaggctgcagcgagccttgatcatgccactgcactccagcctgggcaacacagcaagaccctgtctcaaaaataataataatatggctgggcgcagtggctcacgcctgtaatcccagcattttgggaggtcgagacgggtggatcatgaggtcaggagttcgagaccagcagatcatgaggtcaggagttcgagaccagcctggccaagatggtgaaaccccttctctactaaaaatacaaaaattagccaggcatggtggcacattcctgtaaccccagctactcgggaggctgaggcaggagaatcgcttgaacccaggaggtggaggttgaggtgagccgagattgtgctattgcactccagcctgggcaacaagagggaaactccatcttaaaaataataataataataataatacaactaaataagccagatgtggcggctcacacctctaatctcagcattttgaaagactaaggcaggaggattgcttgagcccaggagttcaagaccagtctgagcaagatggtgagacctcgtctctacaaaatttttaaaaaaatattagcagggcatgctagtgtgcgcctgtagtctcagcttgtcaggaggctgaggtgggaggatcgcttaagtctggaaggttggaagctgcagtgagctgagatcgcaccactgcacttcagcctgggtgacagagggagaccctgactcaaataaataaataaataaatagtcaaaaactaaaaataaagaacagggtttggcacacagtagatgctcaataaatgactcagtgaatggattattgtacagcaaacatcccgtggactcctgctgggaaacctgtttcccttaacttaaattgaccttgggcaagtccctgattcctgtcttggggcttaacctgcatgcccccaaactgggaactggggacacagtgtcttaccacatagtttatggagtcaaccagtcatcccctttcagaggcctcatttctgaaaattgataaaagctaacaacaacaacaacaacaaactgattggtggtgaggcaagtgaattccacatctaggtaacttcaatttcattcattcagccaaactctttttgttgttgtttgagacagagtctcactctgtcacccaggctggagttcagtggtgtgatcttggctcactgcacctctgcctcgtgggttcaagcgattctcctgcttcagcctctggagtagctgggattacaggtgcacacaaccacacctggctaatttttgtatttttagtagagacagggtttcaccacattggccaggctggtttccaactcctagcctcaagtgatctgcctgcctcggtcttccaaagtgctgggattacaggcatgagctgctatgcccggacattcagccaaacatttattgagcacctacactgtactggtccaatgctgaggacacagagctctcagttggataagccagagcaaagtgtttcatttcattgtcttgttcagccatttctttcatccctaaatcagaatttgaatcacagtgagcctgttaccagggcttcacatcctggcttacatgtcacctcctccaggaagccttccaggaccacatttccaggccaggcaagaaccacatttgggccgggcgcggtggctcatgcctgtaatcccagcactttgggaggctgaggtgggcggatcacgaggtcaggagatcaagaccatcctggctaacatggtgaaaccccatctctactaaaaatagaaaaaaattagctgggcgtgatggcaggcgcctgtagtcccagctacttgggaggctgaggcaggagaatggtgtgaacccgggaggcggagcttgcagtgagctgagatcgcgccactgcactgcagcctggcgacagagtgagattctgtctcaaaaaataaataaaataaaataaataaaataaaaaataaataaataaataaaaaagaaccacatttggtctcccattgctgcctgtgcttccctattagcgcatgcacttaattcctaaaaggcagaaactctctgtcagccttctccacacctcctgccacctccagggcctaaccctgggcatgaagagtgctatctttggagtcagatctctctgaatttgaattctggttctgtttcttatttgctgcgtgggcctggacctgtccctcaacctttctgaccctaagtttcctcctctagaacaatcagatttgttgtaagagttcaataagataatgcttataaatgcttttcttttttttaatgttttagtttttttgagatggagtcttgttctgtctcccaggctggagtgcagtggctcaatcccggctcaccgcaacctctgcctcctgggttcaagcgattctcctgcctcagccgccctagtagctgggattacagacgcatgccaccatgcccagctattttttgtatttttagtagagacagggtttcaccatgttagccaggctggtctcgaactcctgacctaaagtgatctgcccaccttggcctcccaaagtgctaggattacagaagtgagccaacatgcctgaacggccgtaaacgcttttcacattgtaaatatttgctaacttgtaaccctttatggccattgttatcagtttcctcatctgtaaaatgggggcatatggatcttgctccccaccctcgacccacactgtgcctggcgctaggtctattattatcagacaggggtggggagtcattctgcaagaggtaggtctgttcttgaagattccagcataagtcaactgtccccccatcctggatgttcccccacaggtgttgtgttccactaccgatcagcccgggaccgctatgcactgaccttcgctgaggcccaggaggcctgccgtctcagctcagccatcattgcagcccctcggcatctacaggctgcctttgaggatggctttgacaactgtgatgctggctggctctctgaccgcactgttcggtgagggggatacacagggcagggagatgaagactagctcatggggaaggaggttccttgggggctccaggagcacacatctgagagggaccctccccttgtgttgtcaggtatcctatcacccagtcccgtcctggttgctatggcgaccgtagcagccttccaggggttcggagctatgggaggcgcaacccacaggaactctacgatgtgtattgctttgcccgggagctggggggtaagtctgggactggcaggacccggcccctccgcctctctttgagtatctattattctccccaactcccatcctccggggtccttatgcaactcccctgtcttatacctccctaaacctgcaaccaagacatgattccactcattttctgagctttccatgcctccctgagtccccctccctccctttgcccccttcctctctctgatcctctttccctctctaatcccctgtcccctgcctgcctccctgtccctatccccttcctcctctgtgagcccccttcaccgagcccctccctctctctgaagcccgacttgcccatgggcctgagttactccatttgtaaaaagaggcttagctctgcatgagaggtaaggacaaggatgatcccggagctggacgcacagctgcggttgtcaccgcctcttctaaccaccaccctaacacgtccaggtcggaactatttggagttggacccacttcctgggctccaggggagggttccccagcccccctgacctccacccgcccctcccgcaggcgaggtcttctacgtgggcccggcccgccgcctgacactggccggcgcgcgtgcacagtgccgccgccagggtgccgcgctggcctcggtgggacagctgcacctggcctggcatgagggcctggaccagtgcgacccgggctggctggccgacggcagcgtgcgctacccgatccagacgccgcgccggcgctgcgggggcccagccccgggcgtgcgcaccgtctaccgcttcgctaaccggaccggcttcccctcacccgccgagcgcttcgacgcctactgcttccgaggtgcgtgcgtcccctggtggccgcgcccccagggctttcactttggcgaaggccacgtccctgaaagcctcgccaagccaagggagagacacatggaagctcgctttgtgataagccacatccctgggtgagggccacgcccccgggtgaaggccacacccgttacgacaagtctttccctaggagccccgtcctgggtaaagaacagggctccagaggaggccactctggtggggagtcacctttgctgggtgggctgtatctcctgaggtccggaggccccataaccttgaaagacaagcccctaggtggggcatactctacctagagccacgcccatacgcagaaacacccccgtggaagagataatgcctcaattggccacctctgggcaccacaccggatgtgggagcagggatgacactcgcccttgttggggggcagtggggacagctttggaagctgcaagcatcaaccccaaggagccatgtcctctaagtaagctgccccagtcctggcatgggcataccatgcccacggggcaccacctgtaccaggggaggatccgtcaccaaggttgagttgaacccctcaacaggcagacccaagttcatgagagttggacactacctgagctttgcccatgagccaaattgtctttttttcttttttcttttgagacagagtctcactctgtcacccaggctggagtgcagtggtgtgatctcggctcactgcaacctccacctcccttgttcaagcaattctcctgcctcagccttcggagtagctgggactacaggaatgtgccaccatgcccagctaatttttgtatttttagtagagacggggtttcaccatgttggccaggctggtcttgaactcctgacctcaagtgatccacccaccttggcctcccaaagtgctgggattacggacgtgagccaccgcgcctggcccaaattctcttgagtcctcactgcagccagttgactctgaccctgacagtggctcaggtggtctccagcctgaacagtggaggtgaaaattttgcacttccctctcccaggctgggggaatctcagaaactacttaggagagacagaggtacacagaaggcttatgctgcagcatgctggaaagtgggtagacttcaagcagaacttcccaggcaacccctgggcctaacacaacctcttctgctttctcccacagctcatcaccccacgtcacaacatggagacctagagaccccatcctctggggatgagggggagattctgtcagcagaggggcccccagttagagaactggagcccaccctggaggaggaagaggtggtcacccctgacttccaggagcctctggtgtccagtggggaagaagaaaccctgattttggaggagaagcaggagtctcaacagaccctcagccctacccctggggaccccatgctggcctcatggcccactggggaagtgtggctaagcacggtggcccccagccctagcgacatgggggcaggcactgcagcaagttcacacacggaggtggccccaactgaccctatgcctaggagaagggggcgcttcaaagggttgaatgggcgctacttccagcagcaggaaccggagccggggctgcaaggggggatggaggccagcgcccagccccccacctcagaggctgcagtgaaccaaatggagcctccgttggccatggcagtcacagagatgttgggcagtggccagagccggagcccctgggctgatctgaccaatgaggtggatatgcctggagctggtgagttgctctgggggaggcgggacctacctggggatctggaggtgagggtagagaggtagccatggctacactcagaatgagggaggaagctccaaatcccagctgggtcctctggccccagaagccccctctcccttgggcctggagtccaaccaaaggggctgctgagagatcattgtaatgattgccttgatgttgttgcaggttctgctggtggcaagagctccccagagccctggctgtggccccctaccatggtcccacccagcatctcaggccacagcagggcccctgtcctggagctagagaaagccgagggccccagtgccaggccagccaccccagacctgttttggtcccccttggaggccactgtctcagctcccagccctgccccctgggaggcattccctgtggccacctccccagatctccctatgatggccatgctgcgtggtcccaaagagtggatgctaccacaccccacccccatctccaccgaggccaatagagttgaggcacatggtgaggccaccgccacggctccaccctcccctgctgcagagaccaaggtgtattccctgcctctctctttgaccccaacaggacagggtggagaggccatgcccacaacacctgagtcccccagggcagacttcagagaaactggggagaccagccctgctcaggtcaacaaagctgagcactccagctccagcccatggccttctgtaaacaggaatgtggctgtaggttttgtccccactgagactgccactgagccaacgggcctcaggggtatcccggggtctgagtctggggtcttcgacacagcagaaagccccacttctggcttgcaggccactgtagatgaggtgcaggacccctggccctcagtgtacagcaaagggctggatgcaagttccccatctgcccccctggggagccctggagtcttcttggtacccaaagtcaccccaaatttggagccttgggttgctacagatgaaggacccactgtgaatcccatggattccacagtcacgccggcccccagtgatgctagtggaatttgggaacctggatcccaggtgtttgaagaagccgaaagcaccaccttgagccctcaggtggccctggatacaagcattgtgacgcccctcacgaccctggagcagggggacaaggttggagttccagccatgtctacactgggctcctcaagctcccaaccccacccagagccagaggatcaggtggagacccagggaacatcaggagcttcagtgcctccgcatcagagcagtcccctagggaaaccggctgttcctcctgggacaccgactgcagccagtgtgggcgagtctgcctcagtttcctcaggggagcctacggtaccgtgggacccctccagcaccctgctgcctgtcaccctgggcatagaggacttcgaactggaggtcctggcagggagcccgggtgtagagagcttctgggaggaggtggcaagtggagaggagccagccctgccagggacccctatgaatgcaggtgcggaggagggtgagtacaaagtcccggggctctgtccagctctccatggtcagggcttggggagcaggggctgggggatcccagagcagggaggaatggttgtccctggggatctggaagctttctagtggggcatgacgctggaggtaggagcttatcaggtggagttgaatttcagaaaggacattcctggcagaggaacgagcactggcaaaggccaggagatgaagtagcgcttgatcaatttcgggcacagagcatacatcccaatgaacaaagtgtgagagtagtgagtggccgggcatggtgcctcatgcctgtaatcccagcactttgggaggctgaggcgggcagatcacttgaggtcaggagttcaagaccagcctggccaacatggcaaaactccgtctctactagaaatataaaaattagccgggtgtggtggcacacacctgtaatcccagctactggggaagctgaggcataagaatcgcttgaacccgggaggcggaggttgcagtgagctgagattgtaccactgcacttccagcctgggtgacagagtgagactctgtcaaaaacaaaaacaaaaacaaagtgtgggagtggcgaggcattgagtagagtctgatttggggatgagttcaggtacaagccatgtctacatctgctttgagctggacagtggtgtgatggactggctttccaggattccccgagtctgaggaagacagagcaggacacagacgcctcccaggcgagaccagagggaggaggcatggcagggagggtttcctggacaaatgtgaatgggagctggaattcggtgatttgactcgtgggggacctcaagccacagggaaagtgggtgctggggagccatgcaaggggcgagaatcacccccattctacagatagcaaaccggggctcagggaggtaaaacgccgcttggctaatcagtggtcacacctcaactggagcccaagtcagcctgagtcttagctactctgtggccagcagcgtccatagaaatcggctgccctgttctccctggggccaggtcagcctcagctcagcctgcaaattccagcccttcttaggttctgccaaattaagctgagttttttggccaaatgaaatttagaaacaaacaaacaaaaaagaggctgcgtgtgatggctcatgcctgtcatcctagccctttgggaggctgaggtgggagaatctcttgagctcaagagttaagaccaggctggccaacacagcaagaccccatctctactaaaaataaaaagaaattagccaggctgcagtgagctatgatagttccaccgcgagaccctgcatgaaatcaaactaacaaaacaaaacaagcagctaattaataagtctttttttctgagttgcacactttttttttgtttgttttttgagactgagtctcactctgtcatccagcctggagtgcagtggtgtgatctcggcgcactgcaacctccgcctcccaggttcaagtgattctcctgcctcaaccttctgagtagctgggattacaggctcccgccaccacgcctggctaatttttgtatttttagtagagacaaggcttcaccatgttggccaggctggtcccgaactcctgacctcaggtgatccacctgccttggcctcccaaagtgctgggattacaactgtgagccatagcacccagtcgagttgcacacttttattaacaccattgatgtttaactaccgcaccccccacccccaaatttttttttttttttttttagaaagggtctcactctgtcacctaggcttgagtgcagtggcaagatcgtggctcactgcagccttgacctccccaggctcaggtgatccttctgcctcaggctcccaagcagctgggaccaggtgtgcaccaacaggcctggctaatttttgtattttttatagacagggttttgccatgttgcccaagctagtgcccgtttttttgaaggcaaagtgtcatgatgatggaaatagctgatgcaggtttcatcatccagcctgtcacttctgggctgtgttggggtgggatcttttttttttttttccttttttttttttttccagacagggtcttggtcagttgttcaggctggagtgcagtggtgcaatcatagctcactgcaccgaggctcaagtgatcctcccacatcagcttctccagtagcttggactacaggcatgcaaccaccacacccggctgtgtgtgtgtgtgtgtgtgtgtgtgtgtgtgtgtgtgtgtgtgtagagatggggtctccctatgttatccaggctggtctcaaactcctgggctcaagtgatcctcttgccttggcctcccaaagtgttgggattacagacatgagccgtagcgccgggcagttctttttttcttagatgtccaggaggcaggccgaccgccccaccccgtatcgataaaggctgacatttatgggttactgccagtgtgcttggcttattcaaagcactttactggagttatcttggttaatccttttaatgtccttatgggaaaagctccagtgtgatccttactttgcagatagggagacagacacagagaggtgaagtgccttgtgcagccatgcaactaagggagtgtcaaggctggggtttgaatccaggtcatctgaacatggggtttcttttttttttttttttgagagagagagtctttctccgtcgcccaggctggagtacagtggtgatctcaggtcagtgcaacctccgcctcccaggttcaagtgattttcatgcctcagcctcctgagtagctgggattgtaggcgtgcaccaccatgtctggctaatttttatacttttagtagagatggtgtttcaccatgttgaccaggttggtctcaagctcctgactcaagtgatctgcccgcctcagcctcccgaagtgctgggattacaggcgtgagccaccgcacctggccggaaaacagagcttctgtctcagccactaggctgcgaaatgcttagctcgttggcataaaaaagtacatgaggccgggcatgatggctcacacctgtaattccagcactttgggaggctgagacggaggatcacttgagcccaggaattggagaccagccttggcaacatagtgagaccccgtctctacaaaacaaattttaaaattagccgggcatggtgggtacctgtggtcccagctactcaggggtgctgaggtgggaggaccgcttgaccctgggaggttgcagctgcagtgagctatgatcatgcaactgcactccagcctgggggacagagcaagactccatctcaaaaaaaaaaattaatcttggggtggtggtgaggagagaagagacgggctaggtggggatcaaccctggaaagatgatcagaggggaagaagctcaatgcccaaagaaatagagaaggggcagtcagagaggtgggagggcgaccacataggaacactaaggaaacgggggttggagctgcacctgggctgaggctgagtctgtcttggacttttctggatcctgggctccacaatgaagccaaccacagcaggatggagattggcgggcagtgctggggagacccaggcagctacccacccgccgcttgcagaagaaatgctaatgaagccaaaaataaatgcagtaccagcgagtgactgagtcaccgccagtccgtgggcaggtgtcagcagcgcggggcacctggcggggctcatgtgtcccgccgcctggcagccttgtgcgtgtgcacacacgtgcagggccgtcgtccagccacaggccctgccatccacaagcccgtttgccatccatggggccaccccagggacaggcctcagctaccgcaggagggccagctgctaccttcattccgttagcaagcaattactgagtgcctattctgtcccagaccatatgttgaaaccaaatcccctctcctctgaaaactgacgtcctagagcaacattctagaactttcccagggatggaaatgttctctatccacgctaatttgaaaaatggctaggacaactgagggacgacgtttttacttttatttcactttaattgatttaagcgtgaatatctatatgtggctgccatatggaacaccagtgctctagggaaagatacagacaagaaacgattgttctaataaaaaaagtaaagtagtgctcgcttcagcagcacatatgctataattagaacaatatagagaagattagcacagcccctgtgcaaaaaatgaagcatttcattcttttttttttttatgagatggagtctcactctgtcacccaggctggaggcgcgatctcagctcactgcaacctccgccttcggcattcaagggattctcctgcctcagcctcccgagtagctgggattacaggttcctgccaccatacccagctaattttttgtatttttagtagagatggggtttcaccatgttggccaggctggtctcgaactcctgacctcaggtgatccacctgccttggcctcccaaagtgctaggattacaggcatgagccatggcacctggcctctttttttttaatttaatttttcaaaaaatttaattccactgggcagtggaatggtcagatgctgccctgacaggatctgggttggctggagcaggatgaggattttttttcagtctgtcacccaggctagaacctatgtccactcctgtgccccaattcatgagaagcacagtgatgagcagggtgtgcccaaaggaggggaaggacactgaagtcagggaggacactgaagcccatgttctgggagaagacattctacgaggtccttcaggcagccctggtctctgggagccccattccagttcagtctgaggaaggactttgctacaggcaggaaagtccccagatgctttggggcagtttctggaagcagtaaactcctcgtaacaggggtcatatgggagggagttggtgaccgctggttggggaagttataaagagggctccatagagagggtttgattagagtggtttgggggcctggggtcttgattccaggaaggcaaaagatctgtggcctgactcttccccacactacccatccatcctgcagtgcactcagatccctgtgagaacaacccttgtcttcatggagggacatgtaatgccaatggcaccatgtatggctgtagctgtgatcagggcttcgccggggagaactgtgagattggtgagtaccccagactcaggatctgaatctgaatttgtttgactccagagccttgggttgtactccagcagccatgccctcagaattcagagatcacaaaaagctggtttcagatgctccattcccaaaccccactccttgcattcagctaaatcagcccagttagtggaaccagaatcaaacagctgagctttcatctctggtgtgctgtctcccattactaccagtcagaggtgggaaggaaaagacaaaggaattatatgtctgagactcctccctgcaaaggccctttggagatcctgccctttcctgggtcggtgggaggtataagcactgccaccagaactgttgggtgctagcttcaaagcccaacacaagaaatactaccaattatgaaattacaacaacaaatataaatgacataattttttgagctctatgtgtcatcttgacttcacaaccttcacaaccacatgactgattacagaattataacaataaatataaatgatataatttcttgagctcttctattgcttccctactcacaatcatccttgagtaggagcccattattattaccattttcaaaaaaagtaagctgagtttcaaggaggggaagtgacttgcccagtgccatacgtgcctcaagcactgtctacacatggaccagtagaagaggagctcaatgaatatctagctttacccacaaacagctttgtgactctgtgcaagtctttgcaaatgcctaaaagagactccagcttcagcattctatgagcctgtttttgagagtataaccttcacttctctagagtcaggtagaacagtctgcacatcctggctctcagctgccccagtggcatctgctctcattaatgctaatttatgttaattgtatgaggttccacccccttgcctgcagagtcattgggccatctgtgcaaactgtgactgctgcacttaggtccaggatggatggtaggaccatgaccccatcttctgcttagtttcctgtgggggctcagagccaaggggaagctgacctctaactcagtctcttcccctctctgccagacattgatgactgcctctgcagcccctgtgagaatggaggcacctgtattgatgaggtcaatggctttgtctgcctttgcctccccagctatgggggcagcttttgtgagaaaggtgagtttctattgcaacaccagaaacagtaccaagagtggggttgggtgcccagccacaggcttccccacatactccaggtccctgcctccagttccatggctgtgagcctgacacaagataaattattcttttagacaaactgtgcgtaacatagaattaaccattttactttattttattatttttttgagatggaatcttgctctgtcacccaggctggagtgcagtggcgccatctcagctcactgcaacccccacctcccagtttcaagcaattttccctgcctcagcctcccaagtagctgggattacaggcgcccgccaccacgcctggctaatttttgtattttttagtagagatggggttttgctatgttggccgggctggtcttgaactcctgacctcaggtgatccacccaccttggcatcccaaagtgctggaattacaggcatgtgccactgcgcctgccctattttattttattttttttttttgagacagagtctcgctctgtcaccaggctggaatgtagtggcacaatctcagctcactgcaacctccaactccctggtccaagtgattctcctacctcagcctcccgagtagctgggattacaggcacacgccaccacgcctagctaaatttattttattttttgagacagggtctcaccctggcacccaggctggatggagtgcagtggtgcgatcttggctcattgcagctttgacctcccaagctcaagtgatcctccctccttagcctccccagtaggctgggactacaggcacacaccaccatgcctggctaatttttgtattttttgtagagacaaggtttcaccatgttgcccagactggtcttgaactcctgagctcaagcaatctgtccacatcagcctcccaaactactgggattacagccactgagcccagccaaattaaccattttaaagtgtacatttcagtggcattctgtacaatcacaatgttgtacagccatcacctctgtctagttccagaactttttcaacaccccagaaggaaactctgtgcccactaggtggtcactccctattcccattccccagtccctggcaaccactaatctgctttctgtctctgtggatttgcctgttctagacatttcatatgaatggaatctcaaaatatgtgtcttttgtgtctggcttctttcacttggcatgttttcaaggttcacctgtattgtaatatgaatcagtgtttcattccttttcatggctgagtagtattccattgtatggctatatcacattttgtttatccattcatggtttgatggatatttgggttgtttcctccagaggctaaggtcaatagtgctgctgtgaatatattcttgtatgtgtttttgtttgaataactatttgccattcttttttttccctctactctttttggtgtatactctcaggagtggaattgctgggtcatatggtaactctaggtttaatttactttttttttgtagagatggggttttgccatgttgcccaggctgctctaaaactcctgggttcatgtgatcctcctgcctcagcctcccaaagtgctggaattacagacatgagccactgtgcttggccttttttttttttttttgaaacaggttctcactctgtgcccaggctggaaagtacagtggtacaatcatagttcactgtcaccttgaactcccaggctcaagcgattctcttgcttcagcctacccagtagctggaactacaggtttgtgccaccatgcctggctaatttttatttttttaatttctttttatttttattttttgagacagggtctcactctgtcacctaggctggagtgaagtggtgtgatcttggctcactacaacctccacctcccggttcaagtgattcttgtgcctcaatctccccagtatctgggactataggcacctaccaccacacgtgactcaattttttttttttttgaagtttagtagagatggggccaggctggtcttgaactcctggcctcaagtgatccaccagcctcgacctcccaaaatactgggattacaggcatgaaccaccatcctcagcctacttttccttttaaaaaaaaattatatgtaatcccagcactttgggaggccaaggcaggctgatcatgtcaggagatcaagaccatcctggccaacatggagaaaccccatctctactaaaaatacaaaaattagcaggcatggcgacacgtgcctgtaatcccaggtacttgggaggctgaggcaggagaattgcttgaacctgggaggtggtgtctacagtgagccaagatcgcaccattacactccagcctgggcaacagagccagactccatctcaaaaaaaaaaaaattttatatatatatatctccatcctagtgggtgtgaagtgatatctcatggtggttttgacattgacaatgagcatcttttcatgtgcttgttggccatttgtatgtcttctgtggagaaatgtctgagctcccatgtccatacgaagggtgtggccccgacatcagagaaggagccttcagcattggaatgagagggggtgtcagggaatgatctcccagttaaatctcttccagaaacaaagaaaagacattaagatttggccagtgtggtggctcacgtctgtaattccagcattttgggaggctgaggtgggcagatcacttgaggccaggagtttgagaccaacctgaccaacatggtgaaaccctatctctactaaaaatacaaaattaggtgggcgtggtggcgcacgcctgtaatcccagctactcaggaggctgaggtgggaggattgcttgagtatgggaggcggaggtagcagtgagccgagattgtgccattgcacgccagcctgggcgacggagtgagaccctgtccaaaaaaaaaagaaaaaaaagaagtcaatatgggaggtgaaagggttgggagagcagagcctcaggaggaggggccaggcatggggagaggggtgatttcgccccgcagtgaccttggattgggccctctctctggtgggctggctgtgctcatggctggtaggccttgggccaaggccagccccccctcacgctcctatcccatctcccagacaccgagggctgtgaccgcggctggcataagttccagggccactgttaccgctattttgcccaccggagggcatgggaagatgccgagaaggactgccgccgccgctccggccacctgaccagcgtccactcaccggaggaacacagcttcattaatagtaggggctctggggagggggccacctgcctggagggtgggcaggggtggcacttgtagcccttttgccagggcatcgcatccctcccctggttttcaagacgtcatctttccaaagctgtgttcattaacgcaagccctgactgcttcttaatgcatgaaatctgtcaattcacttgttaattcatacattcacttcattcattcattcaccaaatatttactgagcacctgctatatgccaggcaccattccaggaatattgacacagcacagcagcaatcaaggctgactttgctttgtccccagggagtgaccatttcttggggaggatatagacaaacaagtaaatatctaagtaaataagtctatactgtaattcaacagatcctatgtgtgctgataacaaaacagggccaggagatggagggtgatgggagaagcacctgtaatgtgttcaaagacctaggagagagacaagtgttccattcatgtaatccgggacttattgatttattcattatccctctgccttctgctcatccatccatttattctgtttattccgtttgccaccatcccatccctcgtgactccttcctttcttccttccctgatttgtttctttttccttgatgtatcccactgggcctctccctcctgagcgactggctcgcgccttctcacctatctgcccgtccagcgcccactggcgtctcctgtcccctacttctcatttctgcaaagatgcaacagtgcccgggtttactcctgcttctcctggccacaaaccctgggatagcctgggcctacttccggttcttcccatgcctcacccccctaaaagagggtagccagagtccccacttgtggagggtggggtgaggatgcacctccagcctacactgaggctgggagaggggttcatgcctgccccctaccctcctcctccttcctttccctcctacctccccatcttccctcccactcctccccctcctccttctatacctcttcctccctcttccccatcctccctccccctcctctccctcctccttccattctttctcctcctccctcctactcctccccttctccctcctctcctccccttcctccttccactcatcttccacctcctttctcctctccatcctccctcccctcctccctctcctcctcccattcctcctcttcctctctcctctcctcccccttccctccccctcctccttccactcatcttcttcctcctttctgctcctcatcctgcctctccctcctcccattcatcccctcctccctcctgctcctccccaggcctcctcccttctactcctcctccttctccttcctcttccccttgctcttcctcctcccttccactcctcctcttttctcctccccattcatctcccactcttccccctcctccctccaactcctcccctcctccttccattcatctttctcctcctttctccttcccttcctcctccctcttctctccttcctccctcccattcctctgcctcctccttccactcatcttcctcctcctttctcttccccatcctccctcccactcctccccctccttcttccactgatctttctcctcctttctcctccccctcctcctcccattcccccctcctccctcctgctcctcatcctcccttccattcctcctccctcctccccatccttcttcccactcctgcccctcctccctttcactcctcctcctttttcctccccctcatctctctccttctcccttccttcccccttcccttctccagctcttacagaggttagggagggcatctgtgtactccctcacctctgtaaacttcacttctatctccttccctctccacctcaacctccagcccacctccaggctggggaaggggctgagtcttcccctcccatacatacctcacccggcccccagcccacagagaggctgagggaggggctctgggtcctcctccatccctgtacctgcttcttccctcttcatttccaccttctagatctttccccccacccagcccacctccaggctggggaaggtgaggaattctttcctcccacaccctaccccacctcacctgcagcctgtgccctgggccaggagaggcatgggtgaacacccagacccacaacccccgaccctgcaggctttgggcatgaaaacacgtggatcggcctgaacgacaggatcgtggagagagatttccagtggacggacaacaccgggctggtgagtggcaggggctgcgggcctaggctgctgagccacatcagccctgccatctggcctcagtttacccttttgtgcaaagttatcgcaattgggtgtcagaggtctctagtggctccaagatgctggagttggcaaaggagcttcaagtgaaggctaaaccttctcccctgacttccccagcccaagtaaacagaccgcgcccacgaagctgcagaggttacaaacctgagactagggtctgatgcctcccctactcactctgcctggtcccccagccatggtctctcaaatattctcatttctagcctgggcatgatggctcatgcctgtaatcccagcactttgggaggccaaggtgggcacttgagactagcctggccaacatggtgaaaccccgtctctactaaaaatataaaaattagctgggtgtggtggcccacgcctctaatcccagctactcaggaggctgaggcgtgagaatcgcttgaacctgtgaggcggaggttgcagtgagccgagatcactccactgcacttcagcctgggtgatgatagaacgagatcctgtctcaaaaaaaaaaaaaagtatatatatgccaggctggtggtccatgcttgtaatcccagcactttgggagactgagtgaggaggatcacttgagcccaggagttcaaggctgcagtgacctgtgatcacatcactgcactccagcctgggtgacagagcgagaccctgtctctaaaaacatattagctcagcatcctccctgcttcaagccctcccagactctccattgttctcaagataaaaattccccttctcccgctgtgtaaaaatctggcggttcctcacacagttaaacatagaagctgggcacagtggtacgagcctgtagtctcagctatcgggaagctgaggcgggaggatcacttaagcctaggaattggaatccagcctgggcaacacagtgagacccccgtctctaaaaatataaaaataaaaataaaaagttaaacatagagttaccacatgacccagcgattctactactagatacatacccagaagaattgaaaacagagattcaaagtggtacaaaaatgtacattattcgggtcatggatacactaaaagccaagactttgccactagatgatatatattttattatatgcatatgcatataataaaattgcacttgtaccctttaaatttatacacagaggccgggcacagtggctcacgcctatgatcccagcactttggaaggccgaggcaggcagatcacttgaggtcaggagttccagaagagcctggccaatgtggtgaaaccccatctctactaaaaatacaaaaattagctgggtgtggtggcatgtacctggaatcccagctacttgggaggctgaggcaggagaatcacttgaacccgggaggcagaggttgcagtgagccaagatcacaccatttcactccagcctgggcaacagagcaggactccatctccaaaacaacacaaacaaacaaaaaattgtactaagaaagaaaaagaggctgggtgtggtagctcacacctgtaatcccagcactttggggaggccaaagtaggaggatcgctggagcccaggaggttgaggctccagtgagctatgattgcaccactgcactccagcctgggtgacagagcaagaccctgtctcaaacaaaacaaaacaggccaggcgtggtgggtgactcacgcctgtaatcccagcactttgggaggtcgaggcgagtggatcacctgaggtcgggagttcaagaccagcctggccaacatggtgaaaccctgtctctactaaaaataaaaaaatagctgggtgtgatggcacatgcctgtagtcccagctacttgcgaggctgaggcaggagaatcgcttgaacctggaaggcgtaggttgcagtgagccgagatcgcgtcactgcactccagcctgggtgacagagggagactctgtctcaaaaaacaaacaaacaaacaaaaacttgtacatgaatgttcacagccccactattcacaatagccaaggtgggaacatccaaaatacccatcaacagatgaaggaagagacaaaatgtggtccatccatgcaatggaatattgttcggccataaaggagaagttggccaggtgcagtggttcatgcctgcaatcccagcacttttggaggccaaggtgggtggattgcttgagttgtggagtttgagaccagcctgggcaacatggcgaaaccccatctctacaaaaaattcaaaaattgagacagagcgagactccggctcaaaaataaaataaaataaaataataaacaaaatgtggaatgagccaggcatagaaggccagctgttgtatgatttttttttttcatgaagcattcagagtaggcaaatttagagacaggaagtagattagtgtttgccaggggctggggtcgggagaagggggagtcactagtgctcaatgagtacagaattttggtgtgttgtgatgaaaaagttctggaaataggctgtgcggggtggctcaggcctgtaatcccaacactttgggaggctgaggtggatggatcacaaggtcaggagttcaagaccagcctgaccaatatggtaaaaccctgtgtctactaaaaatacaaaaattagccaggcgtggtggcgtgcacgtgtaatcccagctactcaggaggttggggcaggagaatcgcttgaacctgggaggcggaggttgcagtgagccaagatcatgccactgcactccagcctgggcgacagagagagactccatctcaaaaaaaaaaaaaaaaaaagaaaaagaaaaagttctggaaataacaatgatggttatgcaacattgtgaatgtaattagtgcattaaactgcacaccgcctcttgaacccgggaggcggaggttgcagcgagccaaggtagcaccactgcaatccagcctggataatagagactctgtctcaacaaaataaaaataacaataaactgcacacgtaaaaatggttaaaattggccaggtgcggtggctcacgcctgtaatcccagcactttgggaggccaaggtgggtggatcgcgaggtcaggagttcaagaccagcctggccaacatggtgaaaccccatctctactgaaaatacaaaaattagctgggcatggtggcgcatgcctgtaatcccagctactcaggaggctggggcaggagaattgcttgaaccgggacctgggaggcggaggtagcagtgagcgagatcgcaccactacactccagcctgggctctgtctcaaacaaaacaaaacaaaacaaaacaaaaatggttaaaattaggaattatgtgctatatatattttgcgctatatatattttgccacaatttttaaaaattcacttccttttctctgatgcaagatctggtccctctctactctctgagcacaccccagccccatcacgcagctccagccccactgggctttgtctgttcctcaagcagaacaagttcagtcctgcctctgagccttcacactggtggttccctttgctaggaatgctgttccctgtctgaacccttactatctttttttttttttttttgagatagaatctcactccatcacccgggctggagttcagtgatgcaacccagctcactgcaacctctgcctcccaggctcaagggattctcctgcttcagcatcccgagtatcttgggactacaggcgcgcaccatcatgcccggctaatttttgtatttttatgagagacagggtttcaccttgttgtccaaggtggtcccaaactcctgacctcaagtgatctgacccccttggcctctcaaagtgctgggattacaggcatgagccactgagcccggccttgaatccttactatctttgattctttaactctcacattgcctcctcagggaagtcctcctggacttcgggctgagatcaccatttgtcccaccatgtatcttttttctttttcttttcctttttttttttttttttgaggcagagtctcggtcttgtcacccaggctggagtacaatagcgcaatctcggctcactgcaacctctgcctcccgggttcaaacaattctcctgctgggattacaggctcccactaccatgcctggctaattttttgtatttttagtggtgatggggtttcaccatattgaccaggctggtcttgaactcctgacctcaggtgatccgcccacctcggcctcccagagtgctgggattacaggcatgagccaccaggcctggccttgtcccaccacttatctaacactgattcatgttgaaaatgaactgggtgcggccgggcacccagggaggcaggaggaccagggaggagaatgctgcagcctccaaaccagaggaatggtgtattggattacagtggtggcccccgtcaggatgggcaggacagtggccattgtagagatgggaacactgaatccctgtgagtttgaggggtctggccaggggagtcccacagcaggaattgccagaacctgggctggaacagaggtcccctgaacaactccctgccccctattcctgcagcaatttgagaactggcgagagaaccagccggacaatttcttcgcgggtggcgaggactgtgtggtgatggtggcgcatgaaagcgggcgctggaacgatgtcccctgcaactacaacctaccctatgtctgcaagaagggcacaggtatgctgtgccccctgcttcttttcctctctgtcacttttgctcactggttctctgttgcccaggctggagtgcagtggcataatcatggctcatcacagcctccaccgcctgggttcaagccatcctcctgcctcagcttcccgagtaggtgggactataggcatgcaccaacatgcccagctaatttttgtattttttgtagagatggggtcttgccatgttgcccaggctggtcccgaactcctgggctcaagcgatctgcctgtctcagcctctcgaagtgctgggattatatgcataagccattgtgcccagccttgattcatttttttttttcatgaagcattcagagtacacaaatttagagacaagaagtagattagtatttgccaggggctagggtttgggagaagggggagtcactagtgcttaatgggtatagaattttggtgtgttgtgatgaaaaagttctggaaataggccgctcggggtggctcatgcctgtaatcccaacactttgggaggccaaggtgggtgggattatattttatttttttaatttattcttattttgtttttacttatttatgtttttggagacagtttcgctcttgttgtccaggctggagtgcaaaggcatgctcttggctcacttcaacctctgcctcccatgttcaagtgattctcctgcctcagcctcctgagtagctgggattacaggcgtatgccaccacgcccagctggtttttatattattagtagagacggggtttcaccatgttggccaggctggtctcgaactcctgacctcaggtgatccacccacctcggcctcccaaagggcagggattacaagcatgagccactgcacctcgccttcatctttttaagttggtaaatgtcagtgcagccagttctcactttccaccagcgtatgagagtgcttgtttcctcccacccttgctaactctgcacattcttaaacttttgttctttgttcatctaagtggggaaaaatagtatctcattgttatcttagtttgcatgcctttaaggatgagaataaccagttgttttttgtttgtttgtttgagatggagtctcactctgtcatccaagctggagtgcagtattgcagtctcggctcactgcaacctccgcctctgaggttcaagcgattctcctgcctcagcctcccgagtagctgggattacaggcacacaccacacctggctaattttttttttgtttttgtatttttagtggagacggggtttcaccatgttgaccaggctggtctcaaacttctgaccttaagtagtctgcctgcctcagcctcccaaagttctggggttacaggtgtgagccaccgtgtctggcctaaccaactgtttatatgttgacagcctgttggcatatatttctttccctgtgaactgtcaattcatctcttttgcccagttttctattgacttgttgatcttactgatttttaagagatctttatatatgaaagaaatcatttgtatacatttgtacatccacctttattttatactttggtttatttttgtttccatttctttgtcaattttcacatcctcccccccatttattcatgtatttatttatttatttttgaaacagggtcttgcaatgttgcccaggctggagtacagtggcattatcacggctcactgcagatcacttgaactccagggctcaagtgatactcctacctcagtcttaccagtagctggactacgggtgcacaccaccatgcctggcttatttatttatttatttattttgagacggcgtcttgctctgtcgcccaggctggagtgcagtggcgcaatctcggctcactacaagctccgcctcccgggttcacgccattctcctgccttggcctcctcagcagctgggactacaggcgcacgctgccacacccagctaattttttgtatttttagtagagacgatgtttcaccgtgttagccaggatggtctcgatctcctgaccttgtgatccgcctgcctcggcctcccaaagtgctggaattacaggtgtgagccaccgcacccggcccttattttaaaatttttttgtagagacagggtcttgctgtgttgcccaggctggtctcaaactcccggactgaagcaatccttccacctcagcctcccaaagtgctggcattacaggcctgagctgccgcacccggcctttatttgctcagataattattattgccgtctgtctccttcattcccattgtgccctatgtttggtgtaagaattagaaagtgaggtgtgtccgggaggttgctgtccctaaggagctgctgatttgggtagaagagacagacagacacagtcacttccagccctgtgagataagaactgggcagaggcagggacctgttgacgagctgaggggggtgtcattcccaataaaactcagcttgagcccatgagttcaaaactagcccgggcaacatagtgggaccctgtctttacaaaaaatcaaaaaattagctaggctcggtggtgcgcacctgtagtctcagctacttgagaggctgaggtgggaagatcccttgagcctgggaggttgaggctgcagtgagttgtgattgtgccactgcactccagcctgagcgacaaaggaagacgctcttttaaaaacaacaataagagccaggcacggtggctcatgcctttaatcccagcactttgggaggacaaggtgggcagctcatctgaggtcaggagttcaagacccgcctggccaatatgacgaaacccggtctctactataaatacaaaaattagccagccatggtggtgcatgtctgtaatcccagctcctcgggaggttgaggcaggagaatcacttgagtctgggaggcaggggttgcagtgagccgagatcacgccactgcactccagtctgggagacagagtgagaccctgtctcaaaaaaggaacaaaaaaatacaaaaattagccaggtgtagattacaggcaggtgcctgtaatcccagctacttgggaggctgaggcaggagaatcgcttgaaccagagaggcggaggttgcagtgaggcaagagcgcgccactgcactccagtctgggtgacagagcgaaactctgtctcaaacaacaacaacaacaacaactagtttagccccagatgtgagcacctctctcactagagattcctctgtcccagtgctctgtggtccccctccggcagtggagaatgcctcactcatcggtgcccgcaaggccaagtacaatgtccatgccactgtaaggtaccagtgcaatgaaggatttgcccagcaccatgtggccaccattcgatgccggagcaatggcaagtgggacaggccccaaattgtctgcaccaaacgtaagtagcttctcccagagatctcaacataggtttttggtatttctagtttccaagtaagacatcctatttctccacacattgatctggcttaatgtctgcctgataatacagccttgcagataagtgagaacttaccagcctgtctgatgtttccttcatttgtgtgtgtgtgtgtgtgtgtgtgtgtgtgtgtgtatgtgtatgagagagagatggagttgtgctctgttgcccaggctggagtgcagtggcacaatctcggctcactgcaacctcccgggttcaagcgatccttgtgtctcagcctcctgagtagctgggatcacaggtgtccactgccatgcccggctaatttttgtatttttagtagagacagggtttcactatgttggccaggctgatctcgaactcctgagttcatgtgatcagctcacctcagcctcccaaagtgctgggattacaggcgtgagccaccacatccggcctggttttgttttttttgaaacagagcctcactctgttgcccaggctggagtgcgaggctcaatcacagctcactatagcctcatcctcccagtctcaagggatcctccaaactcagcctcccaaatagctgggactacaagcatgtgccgccacgcctggctaatttttttatttttgtagagataggttctcgctatgttgcccaagctggtctcaaactcctggcttcaagagatcctcccactttggcctcccaaagtgctgggatgacagggatgagccctcgcgtctggcctctttcctctactttctctcccaaggacacccgctgcatcaggccacctgcctctcaccaccttttgtcccttccctgtcctccctcacttccctgcagccagacgttcacatcggatgcggcgacaccaccaccaccaccaacaccaccaccagcatcaccaccacaaatcccgcaaggagcgcagaaaacacaagaaacacccaacggaggactgggagaaggacgaagggaatttctgctgaagaaccagaaaaaagaaagcacaacacctttcccatgcctcctctggagccttcgcctggggagacagaacccagagagaaacaagagagtccagaagtccctgaaccccaaaccacatcccccacacacataatcctttgtacaaagctcctcttttccctttttttacatacacaagatcctcttggcaggtggagccaggtgtctgaaaagttcattctcgtctggctgaactctgggagtgtgtcccagctgagggaagcacaagtagcaaagctcattggtctggtctcttgtttgccaggctgattgaagcaggccttgatgagggtgcatgagtgtatgtttgcattcacatgaaggaattgcttttcacaccagaaattcagacttagtcaatgttggctgaattcctaaatccaggaagaagcctggacgtagggtcattagctttgggaatagaaggctacacagaagcacactgtttttgaacttgacaacagctctccctttaccctggacttcagcccaagttccgtctttggtcttggtggataaacacacagtgtggagatcccacgtactgcattttagggatgtttttaggacaacctccctccatgccttcagagttaggagtgagaatgatcaaagcaatatgtaggtgatggagggagagtgtattgctaacccttccaggtctagtccagcgctgagatttggtggttctgcatgtgtgatgaatctctttcacacaaatagacgagaggatatttagggctagatgagcccagatttcttccccctccatctctcagggagacaaagaacctccttcctggaccaaggaggtgctgccaagttttctagcccagtgcacatacccagtccttaagcagacattggtagtgcccctgccctgggtcccactcctgccccaccccacccttgtccctggccattgcctggtggtctagaaacacttaaaacttgaagtagtgacacctacctgcggtcatattgtagagagatgctcagtgttaaaactgaaacacacaaacacacacacacacacatttttctcttgtagattttaattttttaagtgggaaagaactcaccttgccttcctcccccaaatgtgcaacctgtaaaaggtctctccacaccaggggccaggatccagttccctcatctctggcaggaaagatccacagcttttcctccatgtctgttactcactttcagcagtccgggtaaaatctgtggatcagggttaaaaaagcaccgtggagaatggccctcttcaggaaagaaaaataagcaaatgaatggtccacctaggggttcagtaaagaaagaaatgtgttaactgagcctgaatcccttctgggaagtaataatgaccattgacaactaagaagtagacaccatgctaaagacttacatacaatctccttgaatcttctcaatagcccattgacttagaaactgttactttcccattttacacacagtgaaactgaggctcagatataaaggaaaggtactggcttgaagtcacaaccacgacaggagtaaggatttggaataaggatttggtcctgttttctggaccaaatccttactctggctctgcttacactttctctccatcaccaaatccttactccaaatccagaagtcagagccaactcccatcttggttctgacccaaatcctgctctggactctggagaggagattgaaatataattgcaccctcatacacatttaggaaatggttaagaagtgtaaactgaacccttatccttgtcttcaatcttcctccctgtagacatctatcttattatggttattattcagaaaacccagggatacaggtttgtcttcttactttgataactcttcttagtttaaaataataataataacacatctttggtcatctatgtcacacaaaaattttcctttgtttgcggggggctggggatgcagtgttttttggggggtcttggtttatgctccctgcccttgagcccctcagccgtttgccctgcccccacctcggctccatggtgggagggggctctggtcttttctaaagtgggcggtttgtcttttgatctttcccttttggatgtgcgtgtgtgtctgcgtgtgccatgtgcgtggcacgcatatgagtgtgtgtgcgtgtgaacggctttgggtcctgctggttttgctgtgagctgcagtgttctgtgggtctgtggtatctgacactgtggacattaatgtacttcttggacattttaataaattttttaacagttcaacctgcccgtcaccacctgataccttcattcattcattcattcagcaagtatttacccgagcagctattgtgatccatgtactgtactgggtgctggggagatagtggtgaacagagaaggtttggtctttagtgggtagtcacagaaggcttccccgaggaggggaatggaatctaaagaagaagtcgcattaactagatgaggagagaaagaaaggaaaggcattccactcagaggaaagagtgaaagcaaaagtcttcttgcagaagggagcgggcgcagtggctcatgcctgtaatcccagcaccttgggaggccgagccaggcggatcacagggtcaagagatcgagaccatcttggccaacatggtgaaaccctgtctctattaaaactacaaaaatcagctgggcatggtggcatgcgcctgtagccccagctactcaggaagctgaggcaggagaatcacttgaacccaggaggcagaagttgcagtgagctgagatggtgccactgcactctagcctggcaacagagagagactccgtctcagaaaaaaaaaaaaaaaaaaaaaaagaagggctcactcgaatcagtaggaaaaagacaaatccattagccaagcaggcaaaagatataaaaaaaagtttacaaaaaaggaaatagcagctctaaaactacaatatagactcaataaaataatacacattttgcaagaacatctagattcacaaggaaggacataaaaatataagagaataaacaaatgtatcaaaagatggccagcatggtggttcacgcctgtaatcccagcaatttgggaggctaaggtgagcagatcacatgaggccaggagttcaagaccagcctggctaacatggtgaaaccctgtctctactaaacatacaaaaattagccaggtgcggtgatgcgcacctgtaatcccagctactcaggaggctgaaacaggagaatcgcttgaacccaggatgtggaggttgcagtgagccaagatcacaccattgcactccagcctgggtgatagagtgatctccatctaaaaaaaaaaaaaagatccttgcatatatcaaagatgataatgtgcttgaactgtgaatgatttacgatttgctcgaccgcctgcacctaaggtcaaagttggtggtggtggttggagatgttcaacctcacaaatagaaacgcaagcaacaaccacattgagataccatttttcacctatcagattgacaaaaataaaaagtgacaagacatgaggctaatgaggatgtgtggaacaggtgagtacttttttttttttttgagaaggggtcttgctctgttgcccaggctggagtgcagtggtgcagtctcacctcactgtaacctccgcctcctcagttcaagtgattctcctgcctcaacctcccgagtagttgggattacaggtgcctgccaccatgctgggctaatttttgtatttttggtagagatggggttttgccatgttggccaggctagtctcgaactcctgacctcaggtgatccacccgcctcggcctcccaaactgttgggattacagccgtgagccaccatgcccagccaggtgagtatatctattacctgtggagtataaattggccccatctctaagaaaatgtggaaatcactatgaaaacggcgagttttagtctgggcacagtggctcatgcctgtaatactagcaccgtaggaggccaaggcaggtggatcacctgaggtcaggagttcgagaccaacctggccaacatggtaaaaccccatctctgctaaaaacagaaaaattagttgggcgcagtggcaggcgcctgtaatcccagctactttagaggcttaggcagaagaatcgctcgaacccgggaagcagaggttgaggtgagccgagaccgtgacattgcactccagcctgggcaataggagcaaaactctgtctcaaaaaaaaaaaaaaaaaaaaaaaatggtaaatggggagttttgaccctttgaacaaacagcttctttttttttttttttttttgagacggagtctcgctctgtcgcccaggctggagtgcagtggcgctatctcagctcactgcaagctccgcatcccaggttaggccattctcctgcctcagcctcctgagtagctgggactacaggtgcctgccaccacgcccagctaattttttgtatttttagtagagacggggtttcaccatgttagccaggatgatctcgatctcctgacctcgtgattcgcccacctcagccttccaaagtgctggtattacaggtgtgagctgccgtgcccggcctgaacaaacaacttctgatatcatcctccagttatacttgaacttgtgagtgatgatgtggatacttacttctagcagaaacatattgagaacaatataaatgtccaccattaggaacctgactacaaaattatgatgcattcaatccaaaccattgatcctcttcagactgtcagaagaatgaggaagaggagatttacttatttttattttttgagacagggtctcactccgtcgcccaagctggagtgcagtggtacaatcatggctcactgcagcctcgaccttctggctcaagcaatcctcccaccttggtctcttaaagtgctgggattataggcatgatccactgtgcacggtcaggaccttacactattttttctcttcatgctttgttgtatcctagaaacttccagtgcttcctcagcccctgccctcagcccacatattcatgtcagggaaagtttgtaatgtctctcccttcctggtacaggaaccccccttccagtttcccgaatttcatgccctggatcttgtcaatgacccagtcaggacagagttgacaaggagcagacccatggtgggtggctaaagggagacagtgggcacaggatgggggaagaaagaggagcaagagattggggaggtgggggaggaatgaaggaccccacttccaaagagaataaaaatcaagcccggccaggcgcagtggctcacacctgtaaccccaacactttgggaggccgaggtgggtagatcacctgaggtcaggagttcaagaccagcctggccaacatggtgaaaccctgtctctactaaaaatacaaaaattagccgggtgtggtggcaggcacctgtaatcccagctactcgggaggctgaggcaggagaatcacttgaacccgggaggcagaggttgcagtgagccaagattgcacgactgcactccagcctgggcgacagggcaggactccatctcaaaaaaacaaaacaaaaaaaaccccaagccccccaagcttgtaacatcttatctaccaaagtgcatttatacaggaattacccactggctgcctcattttctcattcatcaaaagaaacaaggatttattgagcccctactgtatgcttggcactcacggggaccacagaacagccctggtacagtgggagaacacaggttcagaaggagtttgtcacttggtcacacagtgagcaagaagaggcagaattcaaacccaaaccgacctggtcccaaaactcagagataggtttcctagagatgacgtgacagtaaagagggccccagggggaccccagtactcctgcaggcaagacttcgggactggggtctcccacggccgggatggccttgtccatggatcatgtccccccagctgcctgtcaacgccgaggacttcggctgggtcctgacctcttagcacagatcgccgcttagagcctggtgggtgttgaattttaaagaacattccatccctcctggatctctaaggagggaaatgtgggtgggggtcagggaaggagagaggaactgggtgagaatggagatggggtctcagaggacaaaagaggagctcagtgcttgcatatctcaacagaccagggcacgccataggctcggtttcctcatttgtaggacgacgacaaacatgcccgggtgttgcaagattgtctcgtgcacagctgctatccggcatagagttaacgtgcaaacggagggtggcttagcagctccagaagtccagccctgtctggggaaggggcagccatcaggcccctgatggggtgcagtagggtagccctagtaggaggcacccaggacttctggcccacaatgagaagttcctgagaactggaagtctggttgtcatgaggacaacgttgacagtctctatggcaacagcttggtgaacagggccccgttgtccacaaggaaaagcctagggggacaggtgttctgttacctcggactccagagtttggtcaccatggcaacagtggtggggtccaaaccgcctgggggtggagcatggagggtggtctggaactggagtgggcctggggacagggacagtttgtttccatggtgagagccggagaactggatgttgggtcaccctggcgacagcttcggggagggtgatctccatggcggtgagtcagggtagggacagccagaagttgaggtggaggtctctggggtgggggccaatgagatgagaaatgtgtggtatccatggttacagctggaggagggaggcactgtcttcatgggtgtgcctgatgagggaaggggtgtgtgactctaggtgacaggtagcagcaggactggttgccttggtgacagtgggacccaaggcaactgctctgcataactagtgacatggatcttaccggtccccaggcctgggaagatggtctgtttggtgacagttgggaaagggacgtcagaggacagggtgggtttgctctcccttcaaagaaatatctgaggggtgggacgtggcccccagtaagtgagccagctggctgtgtgtcagtctgaggtggcagatgggggtgctcgcccatgaaactagaggggtgtgccctgttacccagaaactgcaggggactctcagggagagggggagaatgggagtctccaggactcaggtcaccataagggaaaataagcgcctcggcccacaacctccatgtgaccacggggagtgaccctgaagttcctgtagtctctccaggtgaggaggagggggaggaggaggcgcccagtgtcccacgtgaccgcaagggactagtgttcagtctccagtgagatgcagaaggtgtacggccggtctctagtcaatcccgggggtccagccaccaggcgaccacgggggcagttggtctgtttccaagtggtctcaggaggcgtggccagtcttcaggagcctgcgggttctgctggcctcctgaggtcctcagggggcgtgaccctcatggagaaagttggggagttgggggaatcctctatccagaagaggtgagggctggccaggctccagggaactccaaagtactgttctgccaggactagccagtcttcagggaccccaggggcacagttagtttgtaagggaccacagggaatgtggccagtgtccagggcttcaagggcgtggccaggctccaggggaccacagggctctagaccagtggtcaagcgccctggctgtccgcctactcccagcctagacgtgcagaggggtccaggcagcaggatcgcgcgcgccccctgcccagccgccgccgcccgcccagccccagccccagccgccaggtgccgggtccggtgctcctggagcgcggtagcagtagacgccgaagagccgtcgggtggcgtccgggaagccgaggctgcgcacaccaggcctgcggcctccgcagcgcgctcgcgggttcacgatggggtagcgcgcactgccatcggccagccaacccgcggtgcagcggtctagcagctgcagcttccacgcggcgaacagctgccccaccttggccacggccgcgccacgcgcagcacacgcgcgcgcagctccggagaagggtacaggtcgcagcggcttcaggaagaacacgcgccctgcgggggtgaggtggggggtgggttattagtgcggctcctgggaccctgcttcggtgggattcaggactgccccccgcatgcagcctaggactctggcctcggccccgggatccaggaacagttcctcctttgcagcctgggaccccagcctaggcccaaccagcgttggtaccaggcggtgtgtgctgcgcctaggcactcttgggagaggggtctcctgtttctgatcgctaagagctgggtggggaagaaggccccggggttggggtagtgttgcagcagaggccagtcttggggtgaggcctacgcacccggcaggttggacgtgaagcagaaggcgtcgtagcgttcctcggcgttatggcgatacccgtagttgcgcaggcccccgttggcatcaccgccgccccctgcactcccggtcccccccaggccgccgcagggctcccggggccggttcacggggtattgcactgagccgtcgcgcaaccagcccgcgttgcaccagtccaggccgtcgcgccaggccgcgtgcagctgttctgcagatgccaggatgccgtcctgctcggcgcacgcgcgctgcgcctccgcgaaggtcagcttgtatcggcctccacgggggtggtagggaaagaccacgcctggcggggggcgcacgggatcagcaggtacaccccagcccaccctcatgcacctgacgtctggggtgctatgtgactcttcaaccgggacctttcagtccattcctcctcactctggcctcagacctgaccacgatcctccccagctcacaccccatatagctgtctcccttcactttaagcttgggattcacttgaccctcccccttaacatactatttgtgtccatccccttccacctctggaggactttgctcatgctctttccaccttattctacctgttgaactcctattcatccttcaaaatccaactcccaaaccctcttccattgagtcctgtgtgcctctgacattccgccagtactgggtccctccctctggtccagccctgagcccacggagcctgcgttcagtgctgactctcctagactaggaccccctggaagattggccctaggtgaagacccctttgattcccccagcattgtccaagggagtacccactgggttcccttctaccttcagttctgatgactttggaacttgtccctcattggactcacagtccgttcagctcaagtattttgtgtgtctgtgtttgagggacgcgggttgggggtgagtggggtaccctggaaagaggcagacagggtccagggagaaggcctggagctgacagactggggattgaatcctgtctctgccaccaactagcactgtcctgggcaaggctctaacctctctgagcctgttgtccatctgctggtaatagctgtctcccttggggtttttaggaaattaaattagagactcctgagaactcttcaactaagcacctgccacagaaaatgtccagtaaaggagagctgctgctattattgttgttatttgttattgttagggaggtcagcaagcaagggccctgaaatctcacctagaatcttctaaagagaactggaaaaggccaatcaaatgggagggaattcttcaaatagaaaccccacctcccagctccagggtgagccaatcagagcatcccatcttccagctacagtgattggctcacagttgggcacatgactcaagctgagccagtgagggacaactctgggactctagctgctgctcctaggaaatcagttgctaagcagggaagtgaaagcctaggcactgtggtcttggttccagaaagagaagcctgtcggaagaaagcctacctgggaagcagagcagaaggatggttcctgacacggtgtgagtgcctggatctcactgtgcctgaatcctatcccaggacttctcagtgtcctcattgtggacattttggactggatcacttttattttattttatttatgtatttatttatttatttttgagatggagtctcgctctgtcgcccaggctggagtgcagtggcacgatctccactcaccgcaacctccacctcccgggttcaagagattttcctgcctcagcctcccaagtagctagaattacaggaatgcaccaccatgcctggctaatttttgtatttttactagagatggggttttggcatgttggccaggctggtcttgaactcctgacctcaggtgatccgcctgcctcaacctcccaaagtgctgggattacagtcgtgagccaccatgcccggcctggatcactccttgtgggggactatcctgtgcctggtaggatgtatagctgcatccctggcctctacccactaggggctagtagcaactgccttctccagatgtgacaacgtaaaatatctccagacatcgccaatgtccctggggaggaaaatcacccagaaccagatatgggggctctaccccaaccaaccttctaaatgcctgcaggccaacttgatttggtttatgtcccttgccatccccgcccccctccttcctcagaagcaaggtttatcctccccaccggctgatcaccttccaggtccagcttgaccatgccagcgtcatcttccagctcattggtgacttcgcactcatagcgcccgtagtcttgcagcgtgacgttgcggaggaccagggaggcatccccaggcccgtcgccctgcagctcagcccgcccacggtagctgccgaatgcccggtgctgggggcctagtgccacgaagacgtcggtgaaggccagcgggtccaccacctttgtccacttgagccggacgccgtcgtgaccgtgggcggctgcctcatagtggtagcggcagggcaagacgatggtgccaccacggtggcttaccacctgcccaggcgctgtctgtaccactaccgagcccgactcaccctctgaggacaaccaagcagggttcagaggaggggcctaggggcagaagggggcctctggggaaggtgtctctggggaggggaacgtgggaagactcgggtgggggtcggggaatcagaagggtccaggggctcagggagagggcgaggggctcagatggggagtggctgggggaaccgcggacgtcaggaacgccctacccgctacccctctccgcacttggccacttctgcttttcgcggagaagaccacttttagcggccctgactcacccagcacgtgcacgaccttcttccggccacgctgcgcccccgcaggggctgtgagcagcaggacgccccaggccgcggcccagagcgcgccgggaccgagggccgcccgagcgcacacctggggggcgggcacggggcgctcagtccagcctcccagccttggcttttcggaggcctggctccctcccgggcctgccttccccacagcgaggacctctctcacgcccatgtccccaccctttccggggtcctggagaactccccctcctcctcttgggacctcacatcctagcttctgcaagaacccacgcccctagactcccccccgccctcagtcctgccccagatcccgcctcattcccccccaccccaaaacccgaggctcgctgccccgcccccttctggccctggcccgggccggggataggggggtggggaagagctggaggagcggcggcagcaaggttatccgtgcgccaggagactgcagcaaaccgggccggggcgggcagggaggggggagagctggagagaaagagggagagacgcggggagagaacagggacagagagaaaggcagggagaggcagagaagagagtgcgcgacacagaaaaaggggaagggaagagagagaggcagagatggagagggagagacagatggaaaagaagagacagatgtagagggagagacagagatggagagggagagacagagaggcagagggagagacagaggggcagaggaagatacagagatggagagggaaagacagagatggaaagggagagacagagaggaagagacagagaagcagagggagagagagagaggcagaggaagagacagagatggagagggagagacacagatggagagggagagacagagaggcagagggagacagagaggcagagggagagacagagaggcagagggagcgacagagagggagagggagagacagaaagggagagggagagacaggagagtgccagaggcagagagactcagagaagaggagggagagatagggacagggaaagacagaaacggagaggagaggaaaaaggcagagaggatgacagagatggagagaggcagggagaaatggagagggagagaacctagagtgccaaaaagagagatcaaagagggtgagagacagagaaaaggaagagacagaagaaactcagagggatatagattcagaggcagagagatatagaatccaagattggggagacggggcacacaccacccgcgcccgcagccccacttaccatcttgcccgcgcggcccccgccgagcggcccctacgcacccggactgcgctccccgcacacccggttaagactgggcaggtccctgcaggcggcgcaatcccggcgtctgcctgcaaggggaggaggaaggcgggcgaggcggggtgtattaaaggggccgcgggggcccacgctcccctggagcagtggctggagcgcgggcggagaaagaagcgctctggacttggagtgcagagctagttccctcaccctgctagctgaacttaggccagggaagaacctctctgagcctcagtttaaccatctttgaaatggaggagggggctgagtcttctatcttggttactgtgctttggcaggggacctgggggatctggtgaaagagatcatttggcctgcaggccacctgtccattgggtagtcatagtggagtcctggtctccagcaccccaaaggcgctccctgtgcagggtgggggcctcacgatagtcacactctgctgtggactggagccacaggccccaattcaagtctgcccctcactggctgtgagaccttggaggagacagttggcctctctgagcctgctgctgactctttggtgaagatccagtagctagacatacagtagatctccggtaggggttgggaggggcaagaaaaagggacatctaggccgggcgcggtggctcacgtctgtaatcccagcactttgtgaggccaagatgggaggatcacctgaggtcaggagtgcgaggccaacctgaccaacatggagaaactctgtctctactaaaaatacaaaattagccaggtgtggtggcacatgcctgtaatcccagctactcagggggctgaggcaggagaattgcttgaacccaggaggtggaggttgtggtgagccaagatcgtgccattgcatatcagccggggcaacaagagtgaaaactccgtctcaaaaaaaaaaaaaaaaaagaaaaagaaaaagaaagaaagaaaaggaaaagggacatctggtcaaggtccctgacttactccaggcccaagtcgcccctaaacctggcctttcacccaatttcaaaaaatcaaacaatagcaaacagtgagtctttctcctaacaccttggcttccttccaggactcagtttcccctaaaatgagcccaacccgaccagataggagaggcagagttgtggtttctgtggtccaacaggctggggctccatctcttagctcagccatgccttggggactgagcgggggaatgatctcagaccaggaccttcacctcctgcagccttggtttccccatctggaatatggagtgagatccagcatgtagcagtcaaggtatacagtaggtgcttaataaatgtatcatgctattagttatgatttattggtagagcaggaacttttctctctggccatgaccttgggcaggtctcttgtccatactgagcctcggttttcccatctggaagatgagccgtgcataccaaccagaggccgccttctgctatcccagcacctctcactcctggcaaccacgatggcagtgataggtgggccctcatgggggccaagaagaggatcccttgcccctgcaccctgaaacacttaggcagtgatattttggaaattgaaagggtttttactgaaaggatccatggggggatgatgggtaagttctggaaggggtagaagcgtttgtgtgggagttggagcatggtgacagctgtgggaggctctccttgcaggaacacttggtcgttggtctccatcccacccactggactgaaactaccatagccaagactaaagacacccggagatgtccctcctgtctctaaaacacccaacccccgcttccccaggtagggctgactgggcacgtaaacagagtcctgggtcctgagtccacagctctctcaatgctgcttcttgtggagggctagggggtcggagggtggtggctggtggaagaatgcgggccactgaaggcaacggtaggccagcaggtgggggcccagcgcatacagcagattgcacacgaagaagcagccccaggtgtcctcaggcacacggtaggtgaagggtgtgcgcaggtgcatggaagcccccatgtgcgagaactgtgcctggtagccagacagggaagatggatgtcaggggccaggaaggaactgaaatcccagcatcaccgacagccccccaggtaggtcaggcagaacccaggggatgcccatccccacctctcgggctttgctcatctatctgtttcccatctccagtccatctatctgtttttttttttttttttttttgagacacagtctcattctgttgcccatgctggagtgcagtggtgcaatctcggttcactgcaacctccgctgcctcctgggttcaagtgattctcgtgcttcagcctcctctgagtagctgggactacaggcgtgcacctctatgcccagttaattttttgtatttttagtagagatggggtatcatcatgttgcccaggctggtctcgaactcctgaggtcaggcaatccatccatcttggcctcccaaagtgctaggattacaggcataagccaccatgcctggcctatttttaaaatttctatctatctatctatctatctatctatctatctatctatctatccatccatccatctatctatctatctatttagagatagggtcttgctctgttggccaggctggagtgcagtggcacaatcatggctcactgcagccccaacctcctgggctcaagtgatcctccaatctcagcctcccgagtagctagcacagcaggcacgtgctaccatgcccagctaatttttgtactttttgtagagacaggtttttgccatgttgcctaggctggtctcagactcctgggctcaagcagccctcccacctcggcctcccaaaatgctgggattacaggtgtgagccacctcacctggccttctgtctgtaaagattcctgcccttacatgtcctgtctgtccctccctgtgcttgtccacttgtctgtgagtcccccccaacttgcctaaccccatctcctgggccctgcaccccatctctctctgacctggctccagatcctcctcccagtcttccccaccccagaggtcttggcacaaatcctgtggattctaaatgttttcctggtccctacttccctggccggggcccaggatttagcacttttcatcaggaacccagaaaaaggctcctagctctgactgggcccctcactgctcaaactcctcctcaaacgccccatcaccctcagtacaagcccctagtcccagagttcaaagccttcagcatccagctgccaatttctcttatctgcctttacctgggttatggccctgctaagtcactctctccctctgtgcttctccttgtgctgttcccattcctggaatgcccttccctgcctggagaactcatcctcgtacatcaaagcctagctcctatgccttgcttctaggaaacctttcccctctggaatccttcacagcccctgtccctattttcatggggcttggagtgtctgtatctggctttgtctcccctagactagggaatcctgggatattgggcctggggctggggcctcttgggggctcatcattacagtgcccagggaggacaccaaaggcattgatgagtagacagaaattccctcccacatgcctgctcacccacccatccgccacctcacctggccgatgcctccagcaaacaccaaggcccagtctggaagccaggagcaaccagggaaggtgagagcataggcagccaggccgcagaaaggcaggacataaaacatgtacatcagcatctgcaggggcgggaggagaggggcaccagcctgtgagatgagcagctaccccaggtgggtctcctgagacccctgaggtggaggccctgaggaaggatctggatggcctcagaccccacccaggctctctgcaaagtgctcctctatttcccttggggatccttgcccccaacccccgaacacatacaccaaacctactaacctttctctgaaagtggcatgcgaccctggcctagccagtcggagcattccagccccctgtccatgatgctcagtaagggatgggcaagtgattcacgctgggccaatctgagcctgcctaagacttgtgcttaagctcgggggtaataagggctcacattgctctggggtggctgagtggggtgcatggaagcctgaagctgccacaggctgtctctgccaccccataaagggactgcctgagagtgaagccatgcaaagaaagcagagctcagaggccgggcatggtggctcatgcctgtaatcccagcactttgggaggccgaggtgggtggatcacttgaggtcaggagttcgagaccagcctgaccaacatggcaaaaccccgtatctactaaaaatacaaaattagctgagtatggtggctcacgcctgtaatcccagctacttgggaggctgaggcaggagaatcacttgagcccaggaggtggaggttgcagtgagccgagatcatgccattgcactccagcctgggccacaagagcaaaactctgtttaaaaaaaaaaaaaaaaaagaaaaagaaagaaagaaaagaaaggaaaagaaaagaaaagaagagcccagagtctgcaccttgagcacctggatccagccatacctgaagaccacatctgtccttttttggtaggacagtaaattccatatgggcttctgcctgtttgagttgtgcttctggcacctgcttcaaagaggcccagtggacccctacccatggcaggggtgtggtcttctccccgctcccctctcacctgcaccttagggtaggccacagggtcccgcaggtatggctcatactggtagatatagacaaagcaggcatctgtggggcaatcaagcaccacctggagcagacagacataccaagaaccctcagacatacctcccacaggaagcctcccccaccctcccaggcccacaccccttgctctggcctctcccagcccagctcaagttgggctggctgggagaaatggggctttgtcatggaacactcaggttagacttgatgaagaacttccttggatgatcaaacaggaagggcagtgtgggagaggtgggtcagggaagggagactggtggcaggggagggggagaccaaccagcgcagactcaccaggccccggaacagagtgaagaagccagcaaggatgagatatatgacaagggccaggtcagccggacgctgcaggagtccctttctttgttcctcttgcacctggcccaggggagagaaacagacagcatgagaggtagtcaatgacaagtattcagtaggtactcaataaaggttcctaaggctcctcccttctttctttttttcttttttttcttttttctttttttttttttttgagacagggtctcattctgttgcccaggcttgagtgaagcagcacagtctcagctcactgcagccttaatctcctgggctcaagtgatcctcccacctcagcctcccgaatagctgggaccacaggcatgcaccaccacatctggctaattttttaactttttgtagagttaaaaaatctggctgtgttgcccaggctggtctccaattcctgggctcaagcgatcctcatgccttggcctcccaaaatgttgggattacaggcatgagccaccgcacccagccctcccttctttcttgtgacaaaggagaaccttccacagaaattaagtctttgaccaaaagcaactgacacggggaaagttcaggcacattgggacaaggcctaagaggggtaaggcactcaccatgttggcggtgcagcgggttagcgcccggggctggctgaagaccttcatgccagcccagcatggcaccagcaggtaggggatggtgaggaagaaggcaggcctgatctcggagctgtatttgccttccatggtgcaggagagagggcatcagccatgccagaaccctgctggacatctgtttgtttgtttgttctgagacagagtcttgctctgtcacccaggctggagtgcagtgatgcaatcttggctcactgcaacctctgcctcccaggttcaagcaattctcttgtctcagcctcctgagtagctgggattatacctggctaatttttgtacttttagtataggcagggtttcaccatgctgcccaggctgatcttgatctccacggctcaagtgattgatgaggcaggtggattgcttgagccgagagttggagaccagcctgagcaacataaggattacaggcatgagccaccacacgtggcctctctggctggacatcttgattcagaaataccatcctcattcaagctccaccaccttccatggctccctagtgcccacaggatgatgtccatactccttagcctagcctgcctcaatttaccttctgaatatggatcctaccttccagtgggttctttgcttcctacaaatacaccttgagtgttccctttgctgaggttttgccatgccaacctcccagactgccttcactgctctacctcccaagacctacccctgaagctttcaccctgtccccaagattcaccctaaaattcccttcctgtgtcaagaccattctgggtcaaacccctggggctgggaaccattgcctggggaggaagcagagttgggttctcccgccttccaagaggaaacagggaccggaaaggggtgggctgctgactgaggctgtggacacgcaaagagggaggtggggcctctgcagacatcagggaagggatggaggatccaatgggggtgcttctaggtgcagggcagtgaccaagcccaagagaacctggatttcccaaagccttgtccttaccaagaatgtttcctgtaaggaacaccaggatgctcatggcgaaggaacccagccagtagagtccaaaattccggtatctcttcctgagcaggggatggaggggtgaccagcaggtagtcactccgtaatctcagagccccagccagggcctggagaccaccgtgggtttcccagctccgggtccctttcagttttgcccaggatggaagggacaacagggagttgaacggggaaataacagtgagaccctctgtccaagaacagaagtggctgcccaggcacagggtggatgtaagcaatgctaggccaccacctacacctgagacgttccctggaaccttctcctggccacccctggctggagccctagagaggcgtcctgatttctcctacagacacttctggctccaccctgccctgggaccccatctgaggatgcaacttctctcccagggtcaggggccaccctctccctgcctcctgcaccttctgcagatggcgccggccatggccaggtagaggaggtagtgaacagtgccatcccagtagcagatgaagactccgtgcgctgtgcgcaggtatggctctccctgtgggggcaggtgggagactcagacgggcagtgcggtagggggctccctggtcgtcccccaagtacctccttggtgtagaactccatgaagcccaccacatagctgtcttcctgaagagcgatgatgaggtccacaaccgaggtgaaggcgaagacagcgaagactgcagtgagtgggcgggccgggtcaggtgtgggaggggacacgtgtgggtggggctagggcttagtgtgggcggggcttgaagttaaggtcagggatgagattattccaggcaaggactccaggcccagtccctgccccaaccccaaaggttgcatgaccacagtcctgcctcattctgcatgtctgatggaggagacacagcctggctctcagaagtccctggtttgattcagaggcccagtgcctgcctttgggagtccccagtctcatgggagaggcaccgtccctgccctcaggagatctcaaagtgatgaggcagtatactctttttcaggagcttctaatctgatgcaggagatgcagtccctgttcttaggagccccagctctgaagggggaggctctttgaggttccccagtttaatgggagtgttcaaatctctttgaggtctccagtctgatgggagctcttaaagggcccccagtctgatggaggaggccccttaatggcccccaagtctgagggtggaggcccttgcctggacagtcttcttccccacagcttcccactgactcaccagcatagagtgggtcataggagacctcgccatgggacaagctgtagaccgccacgaaaagcagacccaggattagggcgctcatcaatgccacccacagggggctgtggagagggaagccaagtcagggaggccaggcccagtgctgaggcatcgccccactctccctggtgggggaaggggcagactcctggaagccccaggggaagagactaaagtgtctgttcatccatcaatgctgttccctgaaactgctctcaccctgtgccaggcccttgctcaggctgtttcttccttctggaaaccgcttccagaagtcttttccacttggcaaactcctactcatccttcatggcccatccacattgttcttcctccatgaagcgctccctgactccccagaaaggatcactgtttaactcgggctagctacagaggggatattcatcagcctgtttctttttctcttttcttttctctttctttctttttttctttttctttctttctctctctctctctctttctttttgagacagagcactgacacccaggctggagtgcagtggtgcaatcttggctcactgcaacctctgccttctgggttcaggcgattatcctgcctcagcctcccaagtagctgggattacaggtgcccaccaccacacccggctaatttttgtatttttagtagagacggggtttcaccatgttggccaggctggtctcgaactcctgacctcaggtgatttgcccacctcggcctcccaaagtgctaggattacaggcatgagccaccacgcctggcctgccccttctgactttaccatttatcccatcatttgttatgtgtttgactcagtctgttcagtcattcgacaacgtcaagcccctctgtggccaggcccagctcccaagccacagggtctcgagtgctcagttctgtagacttcattgtctgacgctcccagctcctcccagctaaagtccaaatgcctctattaactccaccctacccctgccctgatctgcacccacaacctgataagacaggtcaaccagttgcatagataacagaagccaggtctctgggcagccctcaacccaggtgggcaaatccaggcccagagaggatgggagtactgtccagttgtccagggtcacactcaagactctgtccatcactctccaggcccctattttctcatgatcccctcagaacccaagatttccatcctgaccccatctaacaatgacattatagtactcagatgagaccaagacaaatctttgtacacagtttataatccttaaccgtaactatgagatgagatctaggatcgtgcccattacactgatgagggaactgaggctcccagaggaacttggctcacccaggatcccaggagatggagatgggtattcccacccagggagccaggctcatggttaagactctctccaccccatggcttgggttgagctgggtttagaagtacgaggggcttgcagatgcccactatccggtggctggacccacagggctaggatctagggttaggagacagggaccaggaaagggaaccagtagggggaactgagtctagggacatggttagccagccctgaacaagaggaaagtcacaggcctgagacaggcaatggagtagggtgtgtgtgtgtgtgtgtgtgtgtgtgtgtgtgtgtgagcaggagtcaggtacccggggccttatctgggacaatacttttacccttggtgactttggaacctaggcagggcgcatccctgggaaaaccccagaaaccctccaaagctctggcttgtggggactcatcattccttcttcccaggccacaaacatcccaggagcggccgcatcccagcctccagcccggcgggaaggggacttccggttagaggggggtgttcttctggcccaccccaatcctgccgggtcggagctgagctggggcgcagggctcgcagaagccaggtccgcggaccgcgcatcctccctccagcccacctccagtcctccccgcccccgcccgcccccactgtccccaaggccgccctggcccctctccgcacgcactgcgagagcgccgagacgtggttgagcgcgtaggacaccgggagggcgctcagcgacagcgccgcgatcttgccggccagcggcgggatgtccatagcggcggctgctggaccccggctcagccccgacgcgttctccagggcgctcggctcctcgttggcggcgagtccgggccgaggctgccagggacccgccccgcacaaaggtcgaccccgctgcgccctgggcaggccgccgtgaccgccctgcgtgttcccagggagcctccaaggcccctccccggccctccccctggcagctgccccgccccttcgcccctcaccatcgacaccctcgtctccaatggccgtcccgctactcagcctcagtttccctcactgtcaaaggctgggacacaacacctcgggatgcttctgctcttaggccaaggggtgcgccctggaggtcctggcgtgccccctctttcccctgcctccacaacttcgttctaaggaaattttctcctggactctgcgcttctaaacctctgcattccccagagtttcccatccccacccaaagatcaagtcggcattccctgtgcgcacggatggagcaacctccagctcttgggtgcaaaatgcctttcagtgggcttagatttgagttttcataaggtggccacaaatgtaaacgtgtttccaggcaggtgtgaagtttttttgtttgttttttgagaggtctcactctgtggcccagactggagtgcagtggccctcctccttgaactcccagcctcaagagatcctcctacctcagcctcccaagtagttgggactacaggtatgcaccaccacgcgcagctagttattttttgtaaagacagaggtctcacttttttgcccagactggtttcaaactcctgggctcaacagatcctcccacatcagcctcccgaggagctgggattacaggcgtgagccactgcgaggggtctttaagtgtgaggctttgactccggggctgtccctttgcaggctagtcccgggtttagggttcttcatttcggggagagggtagaaggggtcctagcgggtgggggctgaagttagaatatcgggatggagccagtttggtgaagagtttgggaacggtgttcctggcagggaggaaagtggctcaggcttggaactgagcagtggaaaggaggtcggttctgctggggtgtgatgagaagcgagacagctgtgagaggctgtgggaggttttgaacagctgggagggggccacagtattgggggggagaataaggagaccatctgtctttgtcaccccctccaaccagactctggcccatgtggagtacttgtggatgctgcagacagcaaggtgaaccatgcccacctgacgcctgccctgcgggaccccagtctgcagctggcacaaattctaaccactgcccctacctcaggccccattctgcacgcagccccttagcttgatgccaactgggtcacaggtcttcctgaactgggccacaagagggtcttctggccgcaggtctgactcagcctccttccccaggtgtccactgcccatgggtgaagttcaggttcccctggactttccccaactctagcagggtcaacaccccccaggcctgctttctgtctgtaaaatgagccttcttgtaagcgggccccagcatcccctcctccaggcagccctgcctgccacccccaccccaccttctccacacaaggccagggtgcctgtgcccagctcagcctaggggcttggccttgtcccgtgtacaggatgcacctgcacacgcacacagcacttggaggcctcgtcccctggcaaggggtaaagtccatgccctgagcctggtgagcctccaggttgctgagaactgagaagtgacttggatggctgaatgcctgggacccagtgccaggattccctgaaccactggctgcagagaactaccccgctgtgctcagggtcctggcccactgccttctgggcagccctcattcatgggcacccaggccaagcccaccaatgttactctttgctctgcctcagccacagcgtcaggaaagaacaaagggtggtatatcaccccagccttggctctgccactgcatctggcacctccctggtctcagaccccactgagacactctgcagaccgccccaccacggctccctggttcctctcagtagcagcctcagacctcatccccagcagcctggctgactggagtagatcttgtccacctggtccccacacttggcacctagtgtttgctgaatggctgtgtgaacacaagctggcccaggagcccgactccatgccaagcatgtgaatagggagcccctggtgcctgcaggggctgggcagcacccactgggtgtgtgtggagggggtgggggcagatggaaatgcaaattcccagggccctgcccaaccagctgactcggcagctgcagcttaacaagatccccagggtgacttaggcacaaatgtggggctctggccctggggcagatgtgggggtcttggcacacactgtggcctgggctaccctcctgcctcaaaacctccggctctgaggcccttccttctaggagctgcctgacatgttggcatggcacatccatgcatccatgcggctgtcccctaacgacacaagccccagggactcgtgtgcctaccacactggtgggacctgaagggccacagccaacacctgtgtgctgggccgtgccagcaccacctgccaggagagcacatgggtgtgcccagaagccacctgcccccacaggtctgagggaaggtggggccctgcctggagacccctccccaacctccctctgcagcacagtgctaggctcggaggttcctgacattcctttagcccaggtgtggccaagtctccagctttattattattattattatttgagacagagtcttgctctcttgcccaggctggagtgcaaaggcgcaatcttggctcactgcaaccgcttcccaggttcaagccattctcctgcctctgcctcccgagtagctgagacgacaggtgtgcaccaccatgcccagctaattttatatttttagtagagacaggatttcaccatgttggccaggctggtcttaaactcctgacctccagtgatccgcccgccttggcctctcaaagtgctgggatgacaggggtgagacactgcacctggccttccagctttactatgctgaaaacaactttcttcctcccctccagtgcaacccaggctgagcggggatggagactccacaggccaataaggagagccccgagacagcatcttgcatcccgctgctaacaggaggggcttcctgcaacaggaccaggcatctgtggtggatgagcactgggactttattacacggcacggcactcgtgacaacggaaggggtgggcagaaatgcaggccggaacattccacagtccagggacggttggtcattcagaaagtatgtatttccagaacactcagtagtaaggccgtctgggattgttctgtggaaggcaaaacagataacaggaggaggggattagcactaaagacagcagttcctcctgtctggaaccttccggaggcagctgagcccgcacccttgaggtggcagggcaggcttgggggacgggtgggggcttgaatgcaggtgggtggtagggggctcgctggtgagacccagcctggctggactgaggaaggaagggagccttctgttcctaccaccaccctctcctgtcgactgagcaaaggcagcccaggaggacatgcgtaccagggggttgggccggaagcggtaggccagcatcatcctcttgcggaacgcctcatactcgtcgtcctccttggagagctccgccggccggtcaatgccgaagccagcgccgtccactgtggtggtgcccctacagggagaagaggatgtgagcagggacctggggccagaactctggccggggggccgggcacagctgggctctcaacagcacctcccgcgggtgcagggctgggctgggacatatctgcacagagagaagcttgaacctgaatggtcaaggaggggagacccccggggcgggcggggggggggggcctaggccccagggtcccacacaggaaggaggagcccacagtgcaagttgtcgcagctcttgggatggcaggatggttactcaaggacagccttgaagggggcactcggggccagggtcacacctgggagagctcctgcccatctctgggagtggtttcgcactcatggggaattcaaataaggcccttcacaaggcagacaaggcctgacccatctgtaccctcacccaccccatctggcctggagatactcatgaggggacggaaggaggccctgggactggggaggacccagcccgtatggcctcctgcactgcaggcctgtgcctgacaaggggtgtgcagtggggtgctgtgatcattttgccacaagggaaaagcgatgacataaaggggtgggaatggggaggcggcaggggacccacagaccccaagttcatggccatgccctcccacaaggccacactcacttgttcactgggttcttgatgccctggccctctgagcccagcccctcgccctccttccagcccatcttcatcagcatctggtagccgatgttctccacagtcagcttgaactccttgtactctgagtagtcaggctcacggccctcctgcaaggtgaggaggtagctgtcacccaccagggctggggctgtggtggcccccaaatccaaccttctgcctttggtttcaatcagtgctgggaccagtggcccatctgcctccctctcaccagatcagactccttgagaacaaacagaccaagctcctcctgcttctcagggtccccggggccttagtgccaaactgtgcacccctggtggccaagtcaaaagggcaagaggatgagttacacaggccttatccacctgagataaagcaatggttcactggcaaagagaagccccgtgttcatgtcctgagagcaatttgttgtacaaggtactaataagagatggacaacgaggttaccacctcactaatgaggttatcaggccctgaacagttttataaaaaaacctcaaaaagataatgggggacgtgccatgtcagccctctctcctcaggagcccaacagcagcagaggcagaatgttaaactctggttctggagaggccagtccgtggggacttctgccggagaaacactttgcctgtaaactgcacttaattggctccactggaagcaaaatttcccccgcagccccaggaaatgtttctgaggcagcagctgagctgctgtttgctaattccctacacagacggcgcctgtcattaacagatgcctcctgcagcgaaaaggcctggctcctgctgtgatcgagagggtagccaggctactttgggcacctgcagggtgaggcagctacaggaggggctggcatgtggcagaggctggagctagggcccctcctggctcaccttcagggccttgaaggtctccataaacttttccagctcgtctggaggcaggaagtctccgatgaagtgcttgccccggcccatctttgtcagctgctcggcccattctgctcagagaagcagaaaggtgagaagagggagaagcaggaaggaggggagcaggcctggtggctcccagggcacaggtatgaggctcagtgggagcctggggcccccagggaaggaggcggctaggccatgaccccagcccgagcctctgcctggtgaggcagcccagcatttagtgaaccctgtgcagctctccaccctcacgatgtcaggactgctccttttcaccacggagaaaactaggccccagagagactgagcctctcactccaggcctcacagccacaggaagcaggctgggggctaaaccaggatggcagctcaagaccacgtgtggcgcatccaggtaaccttccagggcaggtgaggggggccatgcccagcccagcccggcccaccccgctgccccacatacccctggtcttatccatctccatgcgccgcagctggtgctcccaggtgcccagctcgctgtccacctcctcatcactgtcatagccgtgctggtgctgttggactgccttctcccacagcagctgcatgtcctgcatggcccgcttgtgctgcatgatcatgtcgtacatctgctgcatctgcagggcacactcgccagtgagccagggcacggtgctgtggcctgccggagccccgctcctgctccccgcctccagtgctgggcatcccccgccggaacgtggctcatctggacccctgggcaggactggagcaaggactctagcaagtactgagtactgccctgggttctctaaatcccagtgtggagcacggaggacctcttggccactgaatgagggtgactcagggtcctgacccctgggagggtcaagggtgatgtgacggggctgcgggcctggaggaggggtcacagcgagctgaccccagggactgacaggcaagcgcctgcagctcctcaggggagccaacaccgacactgcccaactacaactgggaggcctcaagtccctcagggtgccctgtgctgaccaggatggtcctgcactagacacgacagaggactgcggacaaagaacatcaacgtagactctcccatgggaaccagccctggagcgcggcgagaagcagccacaaagctcaggccaggatcacagaccaccggggccgccccaagggccagtggtctcccaggcaggctgagaggccactcaggtgcagtggggggtggcatgccacctactggggcagggggacctgcctgcctggaagcctccccgctggccatgggttccacctgaacacaggagcttggcgaagcacatgaacccctgtgaccgctgcacccgggggtagaggacaacactctatgggcgccgaccatgtccccgtccccttgtccccgcagtcttacctcctgctgctccttcagctgcttcttctgggcgtctgaaagctctgtgacgcccactagacccacaggcttccccttctcatagccgagccccttgaggtcctgaactggaaaccaaagacacagggtagtcagagcctgacaggtgcaccccgatctcgctcctgcgctggggtgtgctgtgagtctcacaccttcatgacactccaggcacacggggacctcatatcattactgtcagtgccacgtggtacgtgacggcctcggggtcccgctgtgtgctgccacgtgcacccccgcatcttacgtccttgtgacctctccagccaggctctacgcaccaccacattgcagatgtggacaccaagaatcagaggttccgggactcactcagggtcacacagctaacgagtgacagggcaggaatttgcagagccagagacaagagagctgagacggcatgtgggcagcatgcatgggcgcacgcacaaacgggctctcagaaggcagctccgttgctaacagacaccaggtgtaagcgcgcacagattcagagtctggcgtaagactcagctgtgcgactcccttagctccttcaggggaggcagccaaccatcctcagagcagctgacatttaatttggcatcagctgtggaacttggcaggctccagtaacactgacacatagaaagatgctgcaacagccccatccgggtggcagaaaccaccacccctcgggcggtgcggtgcttcccgggggagaaggtgagcaaaggggtgcagcgggccctctgggaagggaaaagatttgggtccttccagctcatcaacactcgggctttgccgctaagaatggcccacatttgcactcttagtccttccttggtttacagggcactgagggatgtgggggagccctgttggggagacgcaggagccgaagtctgagcatctggttgattgccttagagcatgcccacagtccctttcccccaggcccactccaccacatgagcgggcgggtgagggctgccatgctccctgaggacatggatcagtgggacttgaacctgggcctcagactttggagcctgttctgtccaactaagccacagggcgacttcttcacctgctgggtgtctcagagctggggtgtgtgcgcattgaagcacccggatctaagcactagggttcggcacttgagtgacaaaccaatcctaggtaccctccaccctggctgcagttgctggctacagccctggtaagcataagaatcttcattcagtagcttttctccttgacctagaatctctgaggcccttggggccagggaggcaccgagaaagcaatcatccctgaattggacgagcaggtccaagaggctggccacccgacctgggaaggctgtcgccttcccttttggggtcctgtcctcatcttgcaaacacaggtgatggcgccacacaacagggcacgtcggactcctccatgcacctgtgtgttgagcgccagtgaaggtggagtgagggggtgatgtttctgctccacagtgcaggctgcatagctgcatagtggggcaccatatgacatgagatagtgggtgtcagtcactgattatcatctgcagaatgcaatgacaagagaccaccccccaacccttgtaggtttggtaagaaaatgagagaccaggccataggctggccctccccgaaattgctgctaagaagggagaggtgaaaaggtgattgtgtaaaactgtggtaattattgtgcttatcgttgtctgtctcttgaactttctttcatttttcccgagatggagtcttgctctgtcgctcaggctggagtgcagtggtgcgatcttggctcactgcaacctccgcctcccaggatcaagcaattctcctgcctcagcctcccaagtagctgggactacaggcacgtggcaccacatccagctaatttttgtatttttagtagagacggagtttcaccatattagtcaggctggtcttgaactcctgacctcaggcgatctgcccaccttggcctcccaaagtgctgggattacaggcgtgagccaccacacccagcctcctgaactttctgtgacaagaaagaatccaagtactggccgggagtggtggctcatgcctgtaatcccagcactttgggagactgaggtgggaggatagcttgagcccaggagtttgagactagcctaggcaacatagtaagaccccatctctatttatgttaaaaaaaaaaaaaaagagactcaattcagacccaaagacacaaatacagtcaggaatcacttcatggaggggaccattctggaaatgcatcattaggcgccgttaccaatgtgtgagcatcacagactgtacctccacaaacctagatgctaccgcctactgcacacctacactagatattacagttgaccttgaactacatgggtatgaactatacaggtccacttaatatgctgatttctttcaatgaatatattgaaaaaatttttggagatttgcaacaattcgaaaaaagtcagatgaaccacgtagcctagaaatactgaaaaaaaaatcaagaaaaagttaggtgtggccaggcacggcggctcacgcctgtaatcccagaactttgggaggccaaggtgggcggatcacaaggtcagaagatcgagaccatcctggctaacacggtgaaaccccgtctctactaaaaatacaaaaaattagccaggcgtggtggcaggcgcctgtcgtcccagctacttgggaggctgaagtaggagaatggtgtgaacccgggaggtggagattgcagtgagccaagatcgtgctactacactccagcctgggcgacagagtgagactccatctcaaaaaaaaaaaaaagttaggagtgtcaatgaatgtataagatatatgtagatgctagtctgttttatcacttactaccataaaacatatacacattgcagaaagttaaactttatcaaaacttatgcacacagactgtacataatgtgttttgcagtcaagagaaatgtaaacaaatgtaaagatggtagatgaaatctttttttttggatatggagtcttgctctgtcacccacgctggagtgtaatggtgcaatctcggctcactgcaacctccgcctccacctcccgggttcaaacaaattctcctgcctcagcctcccgagtagttgggactacaggcacctgccaccatgcccagctagtttttttttttccttcttttttttctgtttttgagacagagtctcactctgtcatccaggctggaatgcagtggtacgacttcggctcactgcaacctccgcctcctgggttcaagagattctcctgcctcagcctcccgagtagccgggactacaggtggcacgccaccacacccagctaatttttgtatttttagtagagacaggtttcagcatactggccaggctggtctcaaactcctgacttcattgatccgcccgcctcggcctcccaaagtgttgggattacaggcgtgagccaccacgtccggccaattttgtatttttagtagagacagggtttcaccatattggccaggctggtctcgaactccaaccttgtgatctgcccgccttggcctcccaaagtgctgggattacaggcgtgagccactgcacctagcagattaaatcttaactgcataacattagctgtagtgcacacggtactactgtaatcattttgtagcctcctgttgctattgtaatgagctcaagtgttgagaatatctgcttaaaacaccacatgacactgatcatctctgcacaagctgtttgtccctttagcaaattgcatattgcggtaaagagacatctctcagggttctcaagtatttttcaggtttagtgcaatatagtaaaccttgaataacatcatgggtcccataaaaattgccactagtcaagtgactgtagtcccagctactcgggaggctgaggcaggagaatcgcttgaaccccagaaatggaggttgcagtcagcctagagtgtgccattgcactccaacctgggcaacagagcaagactccatctcaaaaaaaagtgccactagtgatggcggaagtgctcccaagaagcagagaaaagtcaagacattacaagaaaaagctgaattgtttgatatgtgccatagattgaggtctgcaactgcagttgcccactatttcaagataaatgaatccagcataaggaccactgttaaaaaaaaaaaaagaagaagagaaattcacgaagctgttattgcagctatgtcaacaggtgtgaaaaccttgcactttctgtgaagtaactttttatctcactttgaaaatgcagtttttatgtgtataggactgctatcagaatgacacacctacaaggtttaatatgatttaagaaaaaagcaaagtcactatatgacaatttagaacaaaagcaaggcgaaggagcgaaagctggagaatataatggcagcaaaggatggtttgacaggtttagaaagaggtttggctttaagaagatgtcaggataacaggaacaacagcttctgcccacctagaggtggcagatgagttcccagatgccattaagaaaatcattgagaaggaaagatatgcatgtgctcaaacaggtttgtttttttttttttttttagatggagtctcgctctttcgcccaggccggactgcagtggtgtgatctcggctcactgctgcctcccgggttcatgccattctcctgcctcagcctcccgagtagctgggactacaggcgcccgccaccgtgcctggctaattttttgtatttttagtagagacggggtttcaccgtgttagccaggatggtctcgatctcctgacctcgtgatccgcccgcctcggcctcccaaagtgctgggattacaggcgtgagctaccgtgcccagcctcaaacaggtttattttgaaatggagtcttgctctgtcacccaggatggagtgcagtggagcaatcgtggctcactgcaacctccgcctcctgggttcaagcgattctcctgcctcagcctcccaagtatctgggattacaggagcctgccactacacacagctaattttttgtatttttagtagagatggggtttcaccatgttggccaggctggtttcaaactcctgacctcaagtgatccacccacactggcctcccaaagtgctaggatcacaggcatgagccactgtacccggcctcaaataggttttttaatgcagacataagtgccctattggggtgggggagccaaaaaagacattagtaaggaagaggagcaaacaccagaattcatttatttatttctgtttgcttggacacaggttctcacttttttgtccaggctggagtgcaatggcgtgaacatggctcactgcagcctcaatctcccaggctcaagtgaacctctcacctcagccttccaagtagctgggactacaagtgaacaccaccacacccggctaatttttgtggttttttgtagagacagggttttctcatgttgcccaggctggtctcaattcaggcctcaagcgatccgcccacctcggcctcccaaagcactgggattacaggcatgagctaccgtacccggccaagcaccagaacttaaggcaggataacgctactgttttgtgcaaatgcagttgggtttatgatcggggctgcccttatctatgaagctgctaacccctgagtcttaaagggaaaagataaacaccagctgcccgtcttctggttatacaacaagaaggccagggcaggacagccatggtggctcacgcctgtaatcctaacactttgagaggccaaggcaggaggtaaaaatgcctggacaacaaaaattctttttctagattggtttgctcctgaaatcaggaagtaccttgctagtgactgcttgttaaagttcttttgatattggacaatgcccctggccacccagaacttcatgagtttaacactgaaggcatcaaagtggtctactgcatccaaacaaggtctctacttcagcctctagattggggggtcgtaaaaaccctcaaggctcataacacacgtactctatggagaggattatcaaagctacggaagagaacctcagcagagcgaacattatgaaagtctggaagggttacactacaggaaaggccatcaagcctgaaacaataaattcctgctagagaaaactgtcttcagatgtgcatgacttcatgggatttataacagagtccatgaaggaaatcgtgaaagagattgtagagacagcaaaaacgggtagagggtaagggatttcaaaagatagatcttggagaaatttaagaactaaaaagctggacatgggtggctcatgtctgtggtcccaactgcttgggaggctgaggcggggagatcacttgagaccaggagtttgagtccagcccgggcaacataacaaatctcttgtctctataaaaaaataaaaattaaataaaaatttaaaaaaataggtctggccaggcgcagcgggtcatgcctacaatcccagcacttcggaagcccgaggcaggtggatcacctgaggtcaagagttcgagagcagcctggctaacatggcgaaaccacatgtctactaaaaatacaaaactagctggccgtggtggcacatgcctgggtgacagtgcgagactctgtctccaaaaaaaaaagcaaaacaacaacaacaacaacaacaacaacaaaataggccgggcaaagtggctcacgcctgtaatcccagtactttggaaggctgaggcagatggatcatttgaggtcaggagtaagagaccagcctgagcaacatggtgaaaccctgtctctaccaaatacaaaaattagctaggcatgggcacacacttgtaatccaagctgctcggaagactgagacgggaggatcccttgaccccagagcgcagaggctgcagtgagccgagatcgtgccaattcactccagcctgggtgacagagtgataccgtgtctcaaaacataggtgaggcgaggtggctcacacctgtaatcccagcatattgggaagctgaggtgggcggatcacttgaagtcaggagtttgagatcagcgtgggcaacatggtgaaaccctatctctacaaaaaatacaaaaaattagccgggcatggtggtgcatgcctgtaatcccagctactcgggaggctgaggcatgagaatcgtttgaaccagaggggcagaggctgcagtgagctgagattgtgccgctggactctagcctgggcaacacacaaacactccaaatcgaaaaataattaattaattaaaaatagaagagctaacagataccacactggagaaattaacagaagacagctggatggaaaggagtgcttccaaatgagtgccagatgatgaggaagaagccggagaagcggcagcagcaccagaaaagaaaatgacaatctggtaggaggattctcattattcgagactgtttctgacttcttttatgacatggacccgagacatgggcactggaactaagtgtaaatggtagaagaaggaataatactgtatataaacatttttagggaaatgaaaaagaagtcaggcagaaattgtgagatattcccataaagttacagagtgcctgtctctccttccacctcttcggcagcaagaccaacccctactcttcttcctccttagctgttcaacacgacactgatgaagatgacctttgtgatgatccatgtccgcttcataaatagtcaatatattttctcttcctcccttctttttttttaaaagaggcagggtctcgggaggcagaggttacagtgagccgagatcatgccattgcactacagcctgggcaatagagtgaaactgtctcaaaaataaagaggcagggtctgtctggttgctctgtttggaccctctgtcatctaggctggagtgcagtgccacgatcatagctcactgcagcctcaaattcctggactcgtgttcctcctgcctctcagcctcttgagtagctagagctatagatgcacaccacacagcctggctaatttttcctatgattttcttagtaatattttctttcttctagcttattttattataagaatatagtacataatacatataacatataaaaagcatgttaatcaactgtttatgttaccaataaggcttccggtcaacagtaggctattagtagttaagtttttggggagtcaaaagttacatgtagaggctgaggtgggcagaccacttgagctcagttttgaaaccagcctgggcaatgtggtgaaaccctgtctctacaaaaaattaaagaattagccaggcgtgctggtacagggctatagtcccaagctacttgggagcctaaggtggaaggatagcttgagctcaagaggttgaggctgcagtgagctgtgattataccactgcactccagcctgggaaacagagtgagaccctgcctcaaaaaaaaagtttatattcagattttctctttttttttctttttttgtgagacggagtcttgctctgttacctgggctggagtgcagtggcgcgatctcagctcactgcaacctccacctcccgagttcaagcgattctcctgcctcagcctcctgagtagctgggattacaggcatgtgccaccatgcccggctaatttttgtatttttagtagagacagagtttcaccatgttggtcaggctggtctcggactcctgaccttgtgatctgtccacctcagccttccaaagtgctgggattacaggtgtgagccaccaaacccggcctatattcagattttcaactgcacagggcttggtgtcccaacccccatgttgttcaagggacagctgtataccccgttgctcccaggctacaaacctgtaaagtaacacagtaagtatttatgtatctaaacataaaaaaggtacagtaaaaatactgtactataatcttataacaattttaataatgaccactgtcatatatgcagtccatcactgaccaaaatggtgtcatacagggccgggcatggtggctcacacctgtaatcccagcactttgggaggccgaggcggggagattacttgaggtcaggagtttgagaccagcctagcctgcatggtgaaatcccatttctactaaaaatacaaaaattagctgggcgtgggctgggcatggtggctcacgcctgtaatcctagcactttgggaggctgaggcaggtggatcatctgaggtcaggagttcaagatcagtctggccaacttggtgaaacctcgtctctactaaaaccaaaaaaattagcagggtgtggttgcaggcgcctgtagtcccagctactcgggagactgaggcaggaggatcgcttgaacctgggaggtagaggttgcaatgagccgagatagtgccacagcactccagcctgggcgacagagggagactctgcctcaaaaaaaacaaaaaacaaaaaacaataacaaaaacaaaaaagaatgaatgaagaaagaggttccggacagcagaactcatggaggttcctggagggtggcgtgcccagggagggcatggaagctccacgccccttcccccatacgtcgccctatgtgactcttcatctgaaaaaatccctcaagtcaagaatacaaggaactaagagggagttaggaagaatataagggccatgtactcggcccccaacccctaatctcggtgggtgtgggtgataggaaatttatgtctggagatctaagagcaacatgaacttctgctctgcttctcttctagaattttaagaaggtggtagactggcagatgtgacccgccatcacacaagaagaatggaagagatggtggcacactgagactagttggagacccctaggaaattacccttcagtttcctgtggctcccaagtgatggaggaaggctgaaagttcttgcgggcaaggagagagggaaggagcagaaactggttatggtacataaatctatacaaggagaactgagtgtgcttgtgttattatttttaatgtttagataatcaatgtacaaacattcttgctaagtcaggcacggtggctcacacctgtaatcccagcacttgggaggcggaagcaagtggatcatctgaggccaggagtgcgagaccagcctggccaacgtggcaaaaccccgtctctactaaaaatataaaaattagccgggcatggtggtgggcacctataatcccagctactcgggaggctgaggcaggagaatcacttgaacctggtaggcagaggttgcagtaagccaagattgtgccactgcactccagcccggataaaagagcaagactctgtctcaaagggaaaaaacaaaaaacaaaaaaaactctttgctatatatacacagttttgttatttttatttttaaggaaaactgtatttctgaaagtagggtttgaagagaagtttattatagattactgacaaagctaatctatcagttaatatatataacaatcatttatttatttatttatttttaaaagaaagaggctgggtgtggtggctcacgccagtaatcccagcactttgggaggctgaggtgggcggatcacaaggtcaggagctcgagaccagcctggccaacatggtgaaaccccgtctctactaaaaatacaaaaattagctgggcgtgggggcgcccacctgtaatcccagctactcgggaggctggggcaggagaattgcttgaacccgggaggtagaggttgcagtgagacaagatcatgccactgcactccagcctgggtgacagagtgagactccatctcaaaaacaaacaaacaaaaaaataagaaagaaagaagatctaaaaccaataacctaagcgtacaccttagtgagctagaaaaagaagatcaaactaaatccaaagctaacagaagaaaatagtaaagtttagagtggagataagaaaatgaggactataaatacaatggagaaaaatctatgaaaccacaagttggttctttgaaaagatcaacaaaagtgacaaaccttttagttaaactaagaaaaaaatgagagaagactcaattactaaaatcagaaatgaaggaggggctgtaactaacgactgaaaataagacataagttaaaaggaccataagaaaatacaataaactgtgccccaacaaattagatagatgaagtgaacaaattcctagaaacacaaaccatcaaaacacaagaagaaatagaaaatctgaatagacaagtaaatcaggattcgaaaaaaccttccaacaaaaaaaggccaagaggctgggcacggtggctcacacctgtaatcccagcaatttgggaggccgaagcgggtggatcacgaggtcaggagttcaagaccatcctggctaacacagtgaaaccccgtctctactaaaaaaaaaatacaaaaaattagccaggcttggtggcggcgcctgtagtcctagctactcaggaggctgaggcagaagaatggcgtgaacctgggaggcggagcttgcagtgagccgagatcacgccactgcactccagcctgggtgacagagtgagactctgtcacacacacacacacacacacacacacacacacacacacacacaaaagggccaagaattagatagcttcactggtaaagcaaacatttaaaagaagaaataagccgcgtgcagtgattcatgcctgtaatcccagtgctttgggaggctgaggtgggcagatcacttgaggtcaagcattcaagaccagcctggccaacatggcaaaaccccatctctactaataatacaaaaattagccaggtatggtggcaggtgcctgtaatcccagctactcgggaggctgacgtaggagaattgcttgaacctgggaggtggaggttgcagggagccgagattgcacgactgcactccagccagggtgacagagtgagactccgtctcaaaaaaaaaaaaaaaaaagaaagaataccaattctcctcaaactcttccaaaaacacaaaagagagaacatttctaaacttactctatggggctaggattagcctgatacccaaggcagacaaagatactacaaagaaagaaaaataggccaggtgtggtggctcacgcctgtaatcccagaactttaggaggccaacatgggcagatcacttgaggccaggagttcaagaccagcctggccaacatggtgaaaccctgtctctactaaaaatacaaaaattagccgggtgtggtggtggaagaattgcttgaacccaggaggtggagattgcagtaagctgagatcgcgctactgcactccagcctgggcaacaaagagcaaaactccatttcaaaaaaaaagaaaaagaaagaaagaaaaatacaattgaatattcctatgaatacagatggagaaatcctcaataaaatactaggaaaccaaattcagcagcttatgaaaggattatacaccatgaccaagtgggatttatccccgcaatgcaaggatggctcaacatttgaaaatcaatccatgtaatacaccaaattaatagaatgaaggaaagtaaccacacgatgattttatgtatttatttactttttttttttgagactcagtctcactctgttgcccaggctggagtgcagttgctcaatctcggctcactgcaacctctgcctcccaggttcaagagattctcctgcttcagcctcccaagtagctgggattacaggcgtgtgccaccacacccagctaatttttgaattttttttggtagagacggggtttcaccatgttggccaggctggtcttgaattcccggcctcaagtaatctgcccacctcagtctcccaaagtgctgggattacaggcgtgagtcaccgtgcctggcctgttttaactgatgcagaaaaagcatctgacaaaaactaaaacattttcatgataaaaacgctcaataaactaggaacagaagtgaacttccagacaggcctggtggctcacgcctgtaatcccagcactttgggaggccaaggcaggcggatcacccgaggtcaggagttcgagaccagcctggccaacatggtgaaaccctgtctctaccaaaaacacaaaaattggccagtcgtggtggtgggcacctgtagtcccaggtactagggaggctgaggcaggagaattgcttgaacccgggaggcagaggttgcagtgagctgagatcacaccactccagcctgcacatcagagaaagactctgtctcaaaaaaaaaaagaacaagaagaagtgaagttcctcaacacaataaagcccatatataaaaaacacatagctaacatcatacacccacacatcatacatttcacagactggtaaaaggctgaaagctttcctcctaagatcagcaacaagacaaggatgcacacttccaccatttccattcaatacggtactagaagtcctagccagaggaattaggcagaaaaagaaataagaagtatccaagttggaaaagaacctgtaaaactatttctgtttgcagataacacaaacttaaatgtggaaaaccctgaagaatccacaaacagaccgggtgcagtagctcatgcctgtaatcccagcactttgggaggccaaggtggcaagattgtttgaggccagcagtttgagaccagcctgggcaacatagtgggacctcatatcgacacaaaaaatgcaaagattagccaggcatggaagagcatgtctgtagtcccagctacttgggagactggggcaggagaatcaattgagcccgggaggtcaaggctgcagtaagctgtcatcatgccacggcactccagcctgcgtgacagagtgagaccctgtctcaaaagaaaaaaaaaaagaataaagttggaaaaattaactcaaaatggaccaaaaaccctgggtgcaatggctcatgcctataattccaacactttgggaggccaaggcaggaggattgcttgaactcacgaattcaagaccagcctgagcaacatggtgaaactccatctctacaaaaagtacaaaagttagccaggtgtgctggcatgcacttgtagtcccacctacttgggaggctgaggtgggaagaccacttgagcttggggaggtcgaggctgcagtgagtagccactgcactccagcctgggtgacagagtgagactcaaaaaaaaaaaaaaaaacccaaaataggctaaagacctaaatttaagaactaaaggtacaaaactctcggtaggaaacacaggggtaaattttcatgcccggatttggcaattgttccttaaaaatgacaccaaaagcataaaccacagaagaaaaaatagatacatttgacttcattaaaattccatttctagggagggctggattacagcaggcactgggagaccgcacaactacctgccccctccctggcactaccatcccctggagggtctgccttcagttcaaaaaaaaaaaactgatactttctggccacattaaaaaaagaaagaaaatttaaaagttgtatgcatcaaaagacgctattactaaagtgaaaagacaacccatagaatgagagaaagtatttgcaaatcacatagctgacgagggggttaatatccagaatctataaaagagaactcgtacaactcaacaacacaaacaaaccaactttaaaatgggaaaaggtggctgggtgcagtggcctgtaaacccaggactctgagaggctgaggcaagaagatggcttgagcccaggagttcgagatcagcctgggtaacatactgagaccttgtttatataataactgggcaaggctgggcctggtggctcacttgaggtcaggagttcaacaccagcctggtcaacatggtgaaatcctgtctctactacaaaaaaaaaaaaaattagctgagcatggtggtgtgtgcctgtagtcccagatactcaggaggctaaggcaggagaattcgcttgaacctgggaggtgggccgggagcggtggttcacgcctataatcccagcactttgggaggctaaggcaggcggatcatgaggtcaggagatcgagatcatcctggctaacatggtgaaaccccctctctactaaaaatacaaaaattttgccaggcgtggtggcacacgcctgtagtcccagctacttgggaggctgaggcaggagaatcacttgaacctcggaggcagaggttgcagtgagctgagactgtgccacactgtactccagcctgggcaacacagtgagactccttctcaaaaaaaaaaaaaaaaaaaaaaaagaacccgacggcagaggttgcagtgagctgagatcgtgccacttgcactgcagcctgggcaacagagcgaaactctgtctcaaaacaaacaaaaactgggcatggtggggcaagtctgtggtctcagctactcaggaggctgaggtaggaggattccttaagccagggtggtagaggtttcagtgagctatgattgtgccagtgtactcgaacatgggtgacagagacctcatgtcaaaaacataaaacgtggggaaaaaaggactaaaatagacatttctccaaagaagctatacacatggtcaataagcatatgaaaataagctcaacagcactggtcattagggaaatgccaacccagacgacgagatatcacttcatacctcttaggatggttataataaaaagatgagagtatgactcttgcctataatcccggcactttgggaggccgaggcaggaggatcacttgaggacagaagttcaagaccagcctcagcaacatagtgagaccccgtctccataaaactttttttattttaaaaaaaggtgaggatacagaaaaagtggaacccttgtgcactgctggtgggaatgtaaaatggtgcacctgcaggttcctcaaagttaaaaggagaattacaggccagacgtggtggctcatacctgtaatcacagcactttgggaggctgaggcgggtggatcatctgaggtcaggagttcgaaaccagcctggccaacatggtgaaaccccatctctacgtcccagcactttgggaggccgaagcgggagatcacgaggtcaggagatagagaccatcctggctaacacagtaaaaccccatctctattaaaaaatacaaaaaattaggcgggcatggtggcgggcacctgtagtcccagctactcaggaggctgaggcaggagaatggtgtgaacccaggaggcagagcttatggtgagctgaaatcgcaccactgcactccagcctgggcaacagagcgagactctgtctcaaaaaaaaaaagaaaaaagaaaaaagaaaaaaaaggcagaattgcaataggcccagcaattccacacctaggtataccgacaagagaactgaaaacgattcagatagtcacagcagtattattcacaacagccaagcagtgtaaacaacctctgtgaatataagagttcattcacagatgagtgggtaagccaaatgtggtatgtacacacagtggaagatatggccacagaaggaatgaaattctgatacaagctacactgtggatgaaccttgaagacattatgctcagtgaaagaagtcagacccttccaacacagggagggggagagggtctgcccacctgacagaggcgagggagaggcatccacgtccctctgcaccagttcagcaggtgggagctctaccttatcctcttcaggcccccaccggctcttccgcttcctcttcacggtggctgcggaggctggcttcccgggggcagctggagcagggatgatagtgggcgcaggcgtggacgaggcggggcaggtggtggctgggggtaaggaccctgacagggcctcaggaggggacttgcgcttcaggccgggatcaggtgctgtgaagctgcctgtggagctggccttggctttccggaactcctccagcttctgtcggtagtacttgtacccttggctattgggctcatacagaaagctgcaaaggagagttggggggtgcagtgtcagctgggcccgaggccctgtccctgattctgggcaggagcagttctggccttgtgtgcccacgttggccagggtcactatatggtcatgtcatagtcacggtctccaccatgacctcctgccctgccaggcctcctggcagtgactgctggttctggtggcccgatgcccttcctttgaactgagtcactccaatcctcaccctgtctttatcaggcacccatcacactgtcattgttcaccctgctacaaagggaaagggcagggaccctcagacccttccccagggcctgggaaaagtgagacattcacaccaaaaaatctcagattgtggggagacaccagacacgagacagggcagagggacttgtcttgatcccaagggcttctcaaatgcatctttgagacaatgaacatcagaacggaccaaggagctgatttctaccccacgtgggggcaggcagcctcagggaagtgtggcttccagtgaggctgggagcacaggtcttctctgtccctacccagcctgaggagcacagcaggtggcgctgggttcagagccatgttccgcacctactggcgcctctcggaccgtacacatccccagtccacaggactgtctttggggtctatgccaaaagggagagtcttggcccagctccacatggcagaacacgggagagaactgaatgcatgtacagccctgaaagcatgttacagtgctgaacaagatggggctggacctgcacttgtgaatctggagggatggtcatagcaccaaggcgtgcaactaatgtgaattaaagggtcaaggatgctgtgaagtccctttgtgttacagaggccgggcgcggtggctcacgcctgtaatcccagctctttgggaggccgaggcgggcagatcacctgaggtcaggagttcgagaccagcctggccgacatggtgaaatcccgtctgtactaaaaataaaaaaattagctgggcgtggtggtacacgcctgtagtcccaactgctcgggaggctgaggcaggacaatcacgcgaacctgggaggcggaggttgcagtgagccaagactgggccactgcactccagcctggaccagagtgagactccatctcaaaaaaataagataaatagtgagcgagcagcaagagaccccttagacagtttctaggtgagcctgtgtgtctacggccctgctaacatccggtacctcaagagggtgggacagaaggacaggagatgacagcatcttctctgtaatcctgggtcatggtacacgtgtgacccagtgaggaacatatgcaaagattaagaggtaaaagcaacaactgttcaggagagaagggaacagttggtcagatttggaaaagacacttgacagccgggtgagttcagacatggatttgagaggccaagctggggaggctcacttgctagggcgagcaggcatcggggtgtgggggccccttcctggtctcagctggtgcttcaccctgagtgtcctccaggatggtccaaggatgcatcacagtcccctggagggtctgcccatctcggggagggggttacaatggcactcaatggtagacccccatgagggggagaaagtggagccccccaacaccccatctagaacacggctgggtgcaccaccaaggttcccctctggtggaactaatcccaccctgaacccagggataaccactgttaaggtgtttcctgccagtttcagcaaagatttatcttaatagagctgtgatcctatacatatcccagttttaaaaaaaatttctgcctcaagctgatgacataagcctttcctattagaacagtggaagcatgttcactgactggccttgcttcagttccctcacactgggctgccagctcacatgggtgccttctgaaggcggcatactccactggggagatgtgctgatgatttaacccacagaggttggacgctgactgtgtcactgacttttcttttttttcttcctttttttttctgagacggagtcttgctctgtcgcccaggctggagtgcagtggcacaatctcagctcactgcaagctccgcctcccgggttcaggcaattctcctgcttcagcctcctgactagctgggactacagacgcccgccaccacacccggctaatttttttttttttttgtattttttagtagagacggggtttcactgtgttagccaggatggtctcgatctcctgacctcgtgatccaccccgctcagcctcccaaagtgctgggattacaggcatgagccaccgcacccggcctactgacttttcattacagctgatgctctattgacatgatttccaggatgtatctcagaaatgggagaatgactagtccaagggatgggcgtttccagcttttcattttttttttgttttgtttttcaagatggagtttcactcttgttgcccaggctggagtgcagtggtgcaatcttggctcaccgcaacctccgcctgccgggttcaagccattctcctgcctcagcctcccaagtagctgagattgcaggcatgcgctaattttgtatttttagtagagacggggtttctccacgttggtcaggctgttcttgaactctcgacctcaggtgatccacctgcctcggcctcccaaagtgctgggattacaggtgtgagccaccaagcccagcctcattttttattttttgagatggagtcttgctctgtcacccaggctgaagtgcaatggcatcatctcggctcactgcaacctttgcctcctgggttcaagtgattttcctgccttagcctcccaagtagctgggattataggcacatgacaccatgcccagttaatttctatatttttagtagagatggggtttcgccatgttggccaggctgttctcgaactcctgacctcaggtgatccacttgccttggcctcccaaagtgctgggattacaggcgtgagccaccgcaccaggcctccagcttctttatagccatgcagttggttacaaattgtttcccaaagtggctggggtatgcctggcccacaggcgtgacagggaagggccaggagtggccacatgaggcggctgttagatttgggggtgaggggaggtctgccaaccatgtgggtctaactagcatttctgtgctttggggctgcctcacagctgaccctgcatggagattaaacacaggagcaaacctgcacaccctgcaggggcttgaatacctggtcgtccccccgacccacccagttctttcctggtccggctctggctctgcagtgagtgcggaaatgagctcccttcagcctcgtctcctctggctgcccggggtacccaccccaggcgacctcaaccagcctggcctccccgacagccacacctgacaagctgggcgcctgtcagcaacaccccagaacagaaaggacacacaggagggccggggccacctgcaccaatagcatctctcagttctgacatcaggggtgaggctgggctgcagcggctgggccctggacccctctgaccaagcagagccaccgggctctgggccttggacagaattccatatccttgcctgcttctcctttgaaagggttccacagtcagtgtctacctacaatgacagcaaactaggtttcttatttatatagccttaatcaggcaaatgaaggaaagacatgatgacttggagtggactagtgatccaaccctgaggtgtggtcaacaactcaatgatccccagggccagtctgacattcaggacacctgtcgggggggcctccagtcccaggcagatccatctcctgaactccaggcctaaacaatccacggccccaacacaggctcctggacacacaggtaccagactggggcacacctgaatcccaagcagcccctctccccgtccccattcactgggtcagctgagccttgaccctccctgttcccagcccccatgttccctcagtcccacctcccaatggtggcccactgccctcgtctgcctggacctggcctggccatgtctgcccaccctccacgaccttggccagtgaccacagaagcacagttgccccatctgtgatgaagtctagggctgctgaatcaaccagcccagacagctgctgccccaggactgtcatgtgctgtcacacctcctcactgattgagtcggggcttgtgtaacctggggccaggcgtgtgctcacgggcatgtcaccctcacatcccccaggcacccacccgcctccccgggcacagagcaagtgccaaacccacccaatgaatggatgagccagtgaacacagacccagccactggggctagggtacgaccgcatggccggggatggcagggaggctaggctgcttgtcacacacccacccttctgtggaactcgcacacaggctgggtgttccccctccacagatcctaaagttccccattccctgccatttccctcatcataaaggggagaccctgagaacgtacacaacataaactgaacagtactgtgaatttccacttgagagcctgacttgcccccggccaagggctgctgtgtgtcccaaaggcaactgggcaagtgctagagactttctccatgaggcacctgaaagacacaaaggccccaaaggccccgtgcacctgcctcagagactacccaggggtgctggtgtgtgcgtgggacatgcctgtggggaggcagagctgggctctggggtcagagactcttggacctgccagcttctcacagtgggaccccagcaggtggctggactatgctgatccagtgtcctcccctgcagggggactgtggccagggtgacggtcacctccctggcagggccccccttacctgaatgcctggttctcacggttgttctggagggcaatggtttccacctcgggacccccgtccgctatgaacctggccaacttttctgcaaggttcttgacctcttcgtcctctgggggtgaaactttaagcaggctgtcagtactgggctcaactcaccacacccaacagcctaatttctgctaagaaccccaagggcaacaagtggggtttgttttaggaatgatgcaaagagaaacaggcaaatgggaatcagattactacactgggaccagatgccagaattcataacacacctcaagcccccacccccgacccccgccccgtcccacaagggaggtcaagagggcctgggacatgagccaggacaaaggatccaaatgtgactgcgggtctgggtagggcaggaaggcagatgggagcaccccaggtcacatggttagggggtgctgttgggcctcctctcctggggagaggctcagggcacagggccacagggaacacaaggaacaaacctctgcagcctgcgcttggcctgaacatcaattccaccccaccaacccaccagcacttggctgggattttatgtcattgcagtcaaagaccagccagtatttccccttcccctgaaattcatcccatcagaattgcaccagctgacagtgtctgtcccccaggccctcggccctacactacacttgccttgccctgtcctcagtgcccaggaggaagctggggctcatcaacacttgttaatgtaacaaagaaccaacaagcaaaagccccctctacctagggtactgccctgaaccgctctcccagaagcgacctcgacctccatgagctcccgtctaccccacaatgtggcctgacactcaggcttcaccaggtccttggagcactgagggggaaggtggtgtcagacccattcccagagtgaccccagatgcctgggagaatacaggcctcaaccaccggtgccacacagtgccactccagcacctccaggaaccccgattccgcattggggcacggtatgtccacaggcctccccagaatctcccacccgctccgtccacctacctttctgagaggctgcctgcgacttctgtgcttcctttcttatctcagccaccttcttcctgtagtagaggaattccctgctattcttatcgtgcaaaaatctggagaggaggaagtttgcagaagagaggggaaaataagtatctgtgacaggcatatccctgcagcttctatcgtgcaaaaaaaggcaggctggcgagcagggacccgaaagcaagtctccgtgccacatgggagccacttgtcacttctggtgagaatcagaaaacgcttggaacagcatccggcccacactagcaagcacccagccccacacgtgcgactgtgcagcaaacgcattcaacagcacagccttcccttccccggagatactcacgcaaatgctgggttatccttgtagtcctccatagctactttttctaactcggggcctccttctgccacaaagcgggccaatttctctatcactttccgagtctcggctccctctgggggtgaaactttaaggaggctgtcagtactggggttcaactcacacaccccacagtcaataggcacactctctctatggaccacaacgacagagggggtggggggagaagagtgtgagatgcaggaggctgtcgggcgtcccgagtccaggcacaaaacaccatgacgaggggggagtcggtctcactgtcttggtgagacacactaggtgggagagaagtgtgtgaggctgtggtgagctccaggctggaagctagcagaaaatatatccagcttcccctggttttggtgggggaaatgcttaattcttttctttctttaccagttttcagcataatacatcggttccctttcatccttcaaagatgacacgttcttttttaaaaaataccattatgagctctgatttaaacacactgggtgggtttcgatccatggcaactagtgtcatcatagaagctctgcggccggtggaacctcttcaagctggctcctgagggctctggacatggccccaggagtctctgatggcctccttgccatctgccaggacaggcgctccaagatcatctcatacacttcctgcccagacccagagccagccacttctccaagaagtcggtttccatgagaaactgcatctccagaccagcatctgggagctagggatgctcaatgccacaggcttaatcattatttcggggccttttcagtgaacagagctataaagatatatttttatatacggattagcctccccactgagccatgtggaacttgcttttgcatttttcccttggcctgtttctgaggctgtgagtttgtcagctactacacagactgcagtccttgtaggagatgcacaagagaaatttctcgctgccagcaagtgcctggcaactgggcaacatgccagacctgtggctaatcttattccccttgttgcttgggctgctgggaatgggggagaggtggggagtgtgtagcccaacgagggcccctgtgaggtcccgagagcattccgtgactgtctttcaccctaggtcgccctcctgccatgggcccagcaacaatcctgacctggttgctgtttacaggaacaggtgcgtttctgaggccatgcagacagtgggtcataatgggcttcaagggccccgagatggccaataccccttgtaatgcagcagttcccaacagggtacccttggagctgctggggcacccctttaaggaaaggacacacgccagctccattctaatggcccgggggccaagctggcctctgatccgctcggacacacagccagaagcaagggatctcaaggctgtcatggcacaactccacagtcgcttcagtctgtgctgtcagggtgatgtgacctcaccggctagcccttcacacagttcaggtgtcacagggactcgtcctgaatgtggacagggctggacttgctggcaatgctgtcaccacagccacccccctttgccctcctacactgggcggtctggacaagctcacccgtgaccagtgaccgtcctttcccagggatagaagagagcaccctccaacctgcagctcatacctctggcctaaactcaggggacaggtaacccatggtgaggggcagtgctttggggcctcaagggctcagcggaagagccttagaagctcctcctagaagggatgtgaggatgcccttttggagcaaatgcgagaagggcgtgcgcccctgccttggctgggatgagccgctgtgtgagtggaagatggatcccgctgctcccaagatgaagcccacgcgctgatgcccagcaacaccccagccccgcccctcaccctcctttgctctcctcacctcagagggcctgaggctcagctcagaggtctggtggctgcaactcagccgaaagcacccatgcccctggcagcacttgccctgcccaccacagatcccacctgctagagcacgggcactggtggtgggggagcagcagctcccacaacttacctttgatctccagccactgctcatagtcctcctcctcgtcctcgtcaggggactggaagacactcgggcggtgcgccacgggcagctgcttggcgtgggagtagctcttcacagggcccggcaggctggccagccccaggcctgtccgcctgctgatgagcagggacctcttcccagcgctgggggtgggtgtgctgggaggggcgctgggcgcactggtcggggcgtctggtatagaaggaaggatatgcgcactcgggatctgcagggcacctctcccggcttccgacctaacctaggtgctgtgggccccgggggagctgggtccttgacttccagaactcaggggctcagaggaggccaccctgattttacagatggggacagtgaggcaaagagcaaaaggactcgttgtggtcccccagccagaaaagcagcagcctggggctctgaagtgggccgctgtggctggaggcatctcggtcgcgctgcacccacagactggggacagttctggggacagaacgtcagttctgccgggtaagacccgagtccccgaatcccagtttacaaccattcccttggaggtctgtggccaggctgactggccaggggccagcctactgggtgttctcagcctgacacctgatggggaagggactcaaaccagccttcctcattctaggatgaatttggccttgggttaacttttcttagctgttccctgggaaacctgacagaggtcgaagaccagctgtctcaccagcaacaatgggctctggtcggtaaaccccaaaatcagagacatgggcagaagctccacgggtgacgatttacccacctggcatatcacactgcacacctgtaggcgaccaacctacagacaggggtcccattccttgcacaggcattgctgcccactggagaaggccgggaatcccctggggcactgacaagggggccaggtgaggacctggagaccagccattctagcccacactttggtgtccagaggacctacagtgcagaagcacccacagcaaggcaggggatggggcaaggctggtgtgtgacagcttcaggaagagccctgagtctggtggggagcagcatcatgaaattggccagctcaccaccctgagagcaggactagggcccccggatcatgaaagatgctggctctgcacttggggacctcatctttttttttttagtgacagggtcttgctctatcacccaggctgaagtgcagtggtgcaatcatggttcactgcagcctctacctcctgaactcctgggctcaagcaatcctcccagctcagcctccagagtagctgggactacaggtgcacgacaccatgtctggctaattttatttttattttttgcagagatgggttcttgctaggctgtccaggctggtctcacactcttagattcaagcgatcctcccagctcagcctctcaaagggattacagacatgagccaccatgcctggcaggggcttcatctttttaagccttagcttcctaaatggaaagtgtggaaatggaggtaaccagctgcttacagaactcaatgagatttagttggaccatctagacctaaaaaaaataacgtcgagtaagagaaaaaagcttggaacaaaacgcacactatgtcgtcatctgcataaagggtcaaacatctgaaactacggcacacactgcttgactgagaggacaacaggggttgtcagacacacaatttctcgacagttacttcctgtaagaaagggggatgggaggacttcaacctctggtatttttcttttttttttttctttttgagacttagtctcgctctgttgcccaggctggagtgcagtggcgtgagctcagctcacgtgagcagagctggttgcctcccaggttcgtgcaatcctcccacctcagcctcccaagtagctgggattataggggtgtgccaccatgcccagctaatttttgtatttttagtagagacggggttttaccacattggccaggctggtctcgaactcctgacttgaggaggtccacccgcctcggcctcccaaagtgctggaattacaggcgtgagccactgtgcccagtgagtatttttcatgattaacaaagatcagaagtatcaaaggcaaaatgttacatctatgaattcttttttgttttctttttttgagatggagtcttgctctgtctcctaggctagagtacagtgacgtgatctccactcactgctacctccgcctcccaggcccaaaagtgatccacccatctcagcccccccattagttggggttaaagttatgcatcaccatgcctggctaattatttgtattttttttgtagagaggagacttagccatgttgcccaggctggtcttgaattcccgagctcaagcgatcctgtccccttcggcctcccaaagtgctgagattacaggcataagccaccgcacccagccgacatctatgaattctgagtgaagagaatacgacgtgtgttatcagacgtctaccaaagggaaacagaggtagagagaggtgtccctccagaggattcagtgagagcacagacgtggtctgcttgcacggagcaagggacatggcaggcactgagtccacattccctggcacacggggtggtacccgatgaacactagtgccctggtggtcattgttgggtgcccccagctgcgtgcccacccggcacctcagccgcagcaggccccagaacctattgttctctgatgcagctcaggtgtctcgggccagcccggtgtctctgaaaaccctgtatgcagaagacctgctcacccctgctggtgggttcaagctgacccagcttggggatgcctcccatctcccaaagtggtctcacaagtgtggggaaggcttcatcatggctccacctgccccagactgaaatctgacttatctgtctctgctcctacagggtaagcacattgagtgcagggtctacatttgcccccttggtaattttttttttttttgagacgaagtctcgctcttgtcccccaggctggagtgcaatggcatgatcttggctcacctcaacctccacctcctgggttcaaccgattcccctgcctcagcctcccgagtagctgggattacaggcgcctgccaccacgcccggctaatttttgtatttttagtagagacagggtttcaccatgttggtcaggctgatctcgaactcctgacctcaggtgatccgcctgtctcggcctcccaaagtgctgggattacaggcgtgagccactgcgcccagcctgcccccttggtattaatttacatatttattacttgggctgggtacagtggctcctgcctgtaatgtcaacactttggaaggctgagacaggtggattgcttgagcttaggagtccaagaccagcgtgaccaacatggcgaaatcacaactctacaaaaaataaaaaaattagccaggtgtggtggcatgcccctgtagccccagctacagggaggctgaggtggaaggtttgcttgagccccggaggttgaggctgcagtgtgctatgattgcactactgcattctagcctgagcaagagtgaggccctctcaaaaaaacaaaaattactggccgggcggagtggctcacgcctattaccccagcactttggatggccaaggcgggcagatcacgaggtcaggagatcaagatcatcctggtaacacaatgaaacccagtccctactaaaaagatacaaaaggccgggcacagtggctcacgcctgtaatcccagcactttgggaggctgaggtgggcggatcacaaggtcaggagatcgagaccatcctggataacatgatgaaaccccatctctactaaaaatatttaaaaaattagccgggcgtggtggcgggcgtctgtagtcccaggtactcaggaggctgaggcaggagaatggggtgaacccgggaggcggagcttgcagtgagccgagatcgcgccaccgcactccagcctgggccacagagcgagactccgtctcaaaaaaaaaattatttatgtattatttatttatttatgcctttggtgcacgcatgggtggaatgagggcgatctatgattaccggtgagcaggagtctgaggtgggacccatcacttcccatgtgcccagcaaccccagggggagatgcaaggacagcacaaggaaaggggaggcctacactcacctgtgctggtctgtgccttctgcaacttcagaaactgctgcaagaagctaccatcgttggcaaacttgttggaaatgcaggaagagttgtgtgcatttgtgattctagaaccaagacagaggacagagagggtgagctggctagagatggagtgagggcaccagaggacgaggatgaggatgaggccatcacctcgtccatcatggcccctaactcaccccagcactctcacctactgggaccccaaactggcccccagagatttcaagagactactgcgaagtgcgcacagcaggcttcagtacggtaagctgggaacaatcttgttctgataaaagcaatactccatgtattatctctgcctgaatattaaccctccaggtccaaatggccctccaacaagatggctcctgctctctctgcacagcacctgtcctcccttgctagttgattatctgggttgttactgactcatgtctgtcctcctgctagaccttagagttttccaaggcagggcctacatgtctctctctctctgtctctctccctctctatctatctatccgaaacagagttttactctgtcgcccaggctggagtgcagtggggcaatcttggctcactgcaacctcctccacccaggctcaagagattgtcatgtctcagcctcctgagcagctgggattacaagcatgtgccaccacacctggctaatttttgtatttttgtagagatggggtttcgctatgttggctgggctgttctcgaacttctaacctcaagccatcctcccacctcatcctcccaaggtgttgggattacaggtgtgagccaccacacctgacctatttatttaagagacagggtcttgctctgctgccctggctaaagtgcagagtgcaatggtgcgataacagggactgcaggcatgtgccactctgcctggctaattttttaatttttttttttttttttggtagaggtaacatctcactatgttgcctaggctggtcttgaactcctggcctcaagcaatggtcccacctcagcctcccaagtcactaggactaaaggcatgtgacactgttcctggccaatgccatttttttgacaggcatgaagggcagctctgacaacagtatatcagctgtgctcaactttgatttaaatatatttaggcccctgggtttgcctttgtgctaacttgttaaaaacatattttttaaaaagtaaaacatatactttgcaaaaaaaaaaaagagggagagagtgaagataaaatataaaatgccctgtgattcttccagcaagattgctttggctgttttcttagaaatgtttgatgcccaggctgggcgcggtggctcacgcctgtaatcccagcactttgggaggccgaggtgggcggatcacgaggtcaggagatagagaccatcctggctaacacagtgaaaccccatctctactaaaaatacaaagaattagccagatgtggtagcaggcgcctgtagtcccagctacccgggaggctgaggcagaagaatggcgtgaaccaaggaggcagagcttgcagtgagccaagattgcgccactgcactccagcctgggcgacagagcgagactctgtctcaaaaaaaaaaaaaaaaaaaaaaagaaatgtatgatgcccaaagaaatgcttgcagatcccagctctgagctgcaggcccacatgggtaaagaaacacaggctttggctaagcatggtggctcatccctgtaatcccagctacttgggagactgaggtaggagaatcacttgagcccaggagtttgaggctgcagtgacatatgatcatgccactgcacgtctgcctgggcaacagagtgagatcatgtttcttaaaacaaaaaaaagtaacagaggctcattatggaacaaatggaaatgtagaaaaactgaaataagcctaggcaatatggagaaaaccccatctctacgaacaaaacaaaaaattagctgggtgtggtggcgtgtgcctataattccagcattccagaggatcaccggagcccaggaggtcaaggcggaagtgggccgcaatcatgccactgcactctagcctgggtgacagagtaagatcatttaaaaaaaaataaaaagaaaaactgaaacagaaaggaatggaaaaacccaacaatgtctccctactttgcaacagccactattaacactggtatatatctttattttgctctctaaattagaagtcagaggaaataaggctgtgatcacagcacacactctacttcttccatttcctactgtagcacaccatcctgctccaatctcaaattcctcacatacgctgctttttaaacccgcatgacgttccaccatatggatgtacccaatggtgcaaaaagctcatggagtccacagggctagcctttttcctttaaataggagaaaggaataatttttagttcatcagaactaaaataacctaaatacatcaacaaggggcactggttaaataaattacgggccatccacagggaagatggggcagccctgaaaagttgaaattttagacaagcaatcaaatacaatgttaaaggaaaaacaaggccaggcgcggtggctcacgcctgtaatcccagcactttgggaggccaaggcgggtggatcacgtggtcaggagatcgagaccatcctggctaaaacagtgaaaccccgtctctactaaaaattaaaaaaaaaattagccgggcatggtggggggcacctgcagtcccagctactcaggaggctgaggcaggagaatggtgtgaacccaggaggcagagcctgcagtgagccgagatcgtgccactgcactccagcctgggcaacagcgcaagactccatctcaaaaaaaaaataaataaataaaataaataaataaaaaaaaacaaaaggacaggctataaaacagtatctacagtgtggttctacttacatcaaaatacatttgaattaaaaattgttacaaaggccgggtgcgggacctcacacctgtaatcccagcacttcggtaggccaaagcaggcggatcacctgaggtcaggagttcaagaccagcctggccaacatgatgaaaccccgtctctactaaaaatacaaaaaattagccgggcgtggtagcgggcacctgtaatcccagtcactggggaggctgagacagaagaatcacttgaacccaggaagcgaatgttgcagtgggccaagatcgcgccattgcactccagcctggacaacagagttagacttcatctcaaatataaaaaaaaattgttagacaaacacatcgggccaggagcagtggctcacacctgtaaacctaatgctttgggaggccaaggtaggaggatcacttgaacccagaagttcaaaaccaacctgggcaacatagtgagaccccatctacacaaaatttaaaaattagctaggcatggcagtggacatctgtagtcccagctactcaagaggctgaggtgggaagatagcttgagtccaggaattccagactgcagtgagctatgatagtgccactgtactgcagcctgggtgacagagtgagatcctgcctctgaaataaaacaggcccggcacggtggctcaaggctgtaatcccagcactttgggaggcagaggcgggtaggtcacctgtggccaggagttcaagactagcctggtcaacatagtgaaaccctgtctcaactaaaatacaaaaaaatggccgggctcagagacttatgcctgtaatcctagcacttagggaggccgaggtgggaggaacaacctgaggccaggagttaaagaccagcctggccaacatgatgaaaccccatctctactaaaatacaaaaattagccgggcacgatggtgggttcctgtaatcccagctactcgggaggctgagcaggagaatcacttgagcccaagaggcggaggtcgcagtgagccaagatcacaccactgcactccagcctgggcggctgagtgagactctgtctcaaaaaataaaataaataaataaataaataaataaataaatagccgggcatcgtggcgcacactggtaatcccagctactcgagaggctgagcaggagaatctcctgaatccaacaggcggaggttgtagtgagccgagatggcaccactacactccagcctgtgtgacagagcaagactcgtctcaaaaataaataaattaattaattaaataaaattaaaaaaaacagaaaaacacctcaacactcaaccagtgcttgtctctgtgttgcagagttatgagtgactttggttttttgtttacccctcttctacttcctggatttcctaccatgtacatgaattacctttaaagtttaaaaaaagaaggagtagaagtaattttatatgaaaaagaaggttcaatgttgacactaaacaaccaggacattctgggcacccctcagttcctgggcctgcccccatactcacaccctgagcacttcactcaggagggaccaggaagaggtagggacaaggaaagacaagaaatcacattcaggctgcagagtacagcgaacggctcccacctgaaaaccactggtaacaaatactgggagataaaaatgctggttcttggccgggtgcagtggctcacgcctgtaatcccaacactctgggagactgagaggggcggatcacctgaggtcaggagtttgagaccagcctgaccaacaaggagaaaccccgcctctactaaaaatacaaaattggctgggcgtggcagcgcatgcctgtaatcccagctacttgggaggctgaggcaggagaatcgcttgaaacttggaggcagaggttgtggtgagctgagatcgtgccactgcactctagcctaggcaacaaaaaaagaaaaagaaagaagaaaaggcaaacgctgctgggtgcagtggctcacacctgtaatccctttgggaggccaaggtgggaggatcacttgagtctaggagttcgggaccaacctgggcaacataacaagacctcatctctacaaaaatagaaaaaaattagccaggcatggtggcacgtgcctgtggtcccagctacttgggaggctgaggcaagagaactgctaaagcccaagagctcaaggcttcggtgagccatgatcccaccactgcactccggcctgggtgacagagcaaaaccctgtctcaaagaaaaaaaaaaaggaaaagctggagctggaacaaggccttggggaaggttaacacactctacactccagaccccagaggaaggggcctgcctctcagattatcaatctccagcctgaaaagcttggatctggtcaccctcatcacaacatcaccccttgatcaaaacccttggtgccctcagtgtttctcaggacaggcaagtggaaacccttgctgagctatcatccacctgccatccactaagggacagcccctttggtacagcagctcaggctggccctccacatatgggctctctccccttcctgccctctgctgggcaggcctttctctgcttcctcagtgggccagctccacctgggctttcaggatgcaaagctctgtggccttactgtggccacggggcctgggaacacactgcctttgttatcttccaggagctctggggcggcacctgcatccctttgccagtagtttgtcaccccataagggcagaggtttttttttgttttttttttgagacagagtctcactctatggcccagggtagtgtacagtggcacgatctcaactcactgcaacctttgcctgccagatcccagagattctcgtgcctcagcctcctgagcagctgggactacaggcacgtgccacaatgcccagctaattttttgtattttttagtagagatggggtttcactatgttggcaaagctggtctcaaactcctggcctctagtgatcctctgtctcagcctcccaaagggctgagattacaggtgtgaggcagcacacctgaactcaaggcagagatttttactctgttataccccttccctctgcaccacagctggctggcagtaaataactgctgagtggatgagttggcaggctgtcctctgggcttccacatacccctcatttctctcttgccacagtgagcctcccaagggcatctgggtcattccttggatcatcaggctatggctgggtgcaagcacatgctgactgccctcacaagccaaaccctgtgctggtgaccctcaaagactcacatccaggccccatccaggccccagcaggcacttactcgccaggatgtgggggctgagggctggccacctgattctgcttggctttctgttccattttggcttcaatttcccgtttcttctgagcgatgagctcttcctggtgaaggatgttcatgttcatttttccagatttagggggagcaaccccaaaccaccggttagcctttcctggggagggaaaaggagtacgtcggaaatcacccttactccacaaacaccccaagaagctgtgacaggccagagagcaactgatgttcagattaatttatatgtctattagttcatttattcagcaaacacttacagagtgcctgctgcataccataccctgtacttactacgtgctatgcaagagaacacaggtctctgcccacgtgggactcgcttcaggctgggaagacaatagacccataataaaaaagtaactttcgggctggtgcagaggctcatgcctgcaatcccagcactttgggaggcaggggcaggcggatcacttgaggtcaggagatcgagaccagcctggccaacgtggtgaaaccctgtctctactaaaaatacaaaaattagctgggtatggtggcatgtgcctgtaatcccagctactagggaggccgaggcaggaaaattgcttgaaccagggaggtgaaggttgcagtgagccgagatggtgccactgcactccagcctggcaacagagcaagactctgtctcaaaaaaaaaaaaaaaagtaagtgcacaatgtggtaagagctctgctgaaaaccaaaaaagggtgaaaaagtaacaggagagtacatatgcaggtaggacaggcagaaaataaacactagaagaggagacatttaaaccagaaaaaacaaataagaagccagcgtcatgaaaagccaaatgggagatgatctgggcagaagaaggagcagatgtgaaagctcaaggcaggaagaagcctggtacatccaaggagcagcaagtgcccagtgtcagaggggcctgctccagggacaggcagaggtgaggcatgtcagagcatctgtgctttattataagggctttggggagtgatggagaagcactaagatgaagaatgcaagatccattgggtctttttttgagacagggtctggctctgtttctcaggctggagtgcagtggtgtgatctcagctcactgcagcctccgcctccccggctcaagcaatcctcccacctcagcctcccaaatagcttggattacaggcatgcaccacctcacttggctaatttttaaattttttcatagagatgaggtcttgctatagtgcccaggctggtctcaaacattctttccaccttggcctcccaaagtgctgggatttacaggcatgaggcaccgtgccccagtggcttttttttttttttttttttgaggcgaactgttactctgtcagccaagatggaatgcagtggcaccacctcggctcattgcaacctccacctcccaggttcaagcgattctcctgcctcagcctcctgagtagctgggattacaggcgtgagccaccacacctggctaatttttatatttttagtacagttaggatttcgccatgttgtccaggctggtctcgaactcccgtcctcaagggaacctccaatttacgcctctcaaagcgctggaattacaggcgtgagccaccgaacccagccttctttttttttttttttttttttgagatgaagtattgctcttttcccccaggctggagtgcaatggcgcgatcttggctcactgcaatctccacctccagagttccagcgattctcctgcctcagcctcccgagtatctgggactacaggcatctgccgccatgcctggctaattttttcatatttttagtagagatggggcttcaccatgttggccaggctggtctcgaattcctgacctcaagtgatccacccacctcagcctcccaaagtgctgggattacaggcgtgagccaccacacccagccgttttttttgttttgttttgtttttttgagacagggtctcgctgagttgcccaggcaggagtgcagttgcatgatcgtagctcactgcatcctcaaactcctgggctctagagattctcccacctcagccacccgagtggctaggactacaggcacactctaccaggcctagctattttcttttattttttgtagagacaggttcttgctatgttccccaggctaatcttgaactcctgtcctcaagggagcctcccatttaagcctcccaaaatgctgagattttaggcatggatcaccacacctagccaatatccacagggtcgttttattttcatcctggctactaggtaatcattctggccagagaatccacaggcaacaagaccagggaggctcactggctccaagcaacagacaatgatgtcttcagactagggtgatagtatggagacagggaagacacctcagaggttccccatgggactcagaataaaatccaaattttaaaagtctgagccgggcatggtgactcacacctgtaatcccagcacctgggaggctgaagcaggcagatcacttgaggtcaggagatcgagaccagcctggccaacatggtgataccccgtctctactaaaaatacacaaaaacactggccaggtgcggtggccggcgcctgtaatcccagctactcaggaggctgaggcagaagaatggcttgaacccgggaggtagaggttgcagtcagccgacatcgtgccactgcactccagcctgggcgacagagcgaaactccgcttcaacaaaaagaaaaaaagaattctaaaaggccattttcaaggccccgccagatggttcccctcccttctgcttcatccttgacattcttcaaaaggacaagcccatcctaccagggcctctgcatttactggcccccctctgtgtggaaggctccaccctccagggattcccatagctggcattcattgtcttaactcaaatgtcctctgcttgaaaaggcctttccctgggccaggtgtggtggctcacacctttacgtaaccccagcactttaagaggctgagatgggaggatcgcttgagcctaggaattccagacctgcatgggaaacgtggcaacacaaaaaacacacaaattcgctgtgtggtggcgcgcatctgtggtctcagctactagggaggctgaggtgggaggatcacctgaacccagggagccacagtgagccactgcactacagcctgggcgacaaagtgagaccctgtctcaaaaaaaaaaaaaaaaaaaaaaagaaagaaagaaagaaaaggtctttcctgactacccaatatcagaagcctccactctgatcatatcatacgtaacctcacatcatacgtaagtttttgtaaatattttctcattaatgcactgacaccccagtagaaagcaacctccaggaaggcagggccctgtttcggtcaccgctgcatgcgtagcgcccagcacactgcttggcacacagtgagcacgccctaagtatctgctgatgggtaaatgcattctattctggggaagcagaaaggccaaggcttgcagcaaagtgagggtcaaaagacgcgggaaagtgtgtcaagggagcctcaaagcacttcggaaaagcagcttttccagaaagcgggacacaggccagaggccagctgcgacgaaaagaggggtgcagggacagcccaaggttgtcgccgtattggggaacggaggttggagcagccctgaaggcggttgtttcggaaacgggacgcagggccgagccgggtggcggcctctacggagatccgtgcgtcctcagcaaaccaagcgggggcggccagcaacctgggtctggggtctcgagaaaccaagaggtgcagaagccgacgctgtgggctgccccggggctgaagcgagggatccacgggtcgcagcaggacggacccgaggagtcaggggagacacctagccccagggacccaggcggccgcctgagaggaggcgggggctgttacctgcaacatcccggttgtccatcttgagactcatccaatcccacaatgctccggcgccccttaaggggccctgttatagtgtgcatcgcctgatgggagatgtagtccgcctcggtcagactcgccctattactgcgtgaacgactgggtttttttttttttaacctccagaaacggaagcctcagcctatcagcgatgcctaagtcccagtcacgataaccaaacggcgtcgcccttttacaccttcccggagcggcagtcatcccaaatacaaactacatgttccaggatgctttgggcggcagatctcgcggaagccgcgaggagagcccggccccgtctcgcgcgcctgcttccgcctccctgtggcggcggcttgttgttgtggaggccaaaatggcggctcaggcggcggcagcggcccaggcggcggcggcccaggctgcgcaggccgaggcggccgactcgtggtacctggcgcttctgggcttcgctgagcacttccgcacttccagcccgcccaaaatccgcctgtgcgtgcactgcctgcaggccgtgttccccttcaagccgccgcagcgcatcgaggcccgtacacacctgcagctgggctccgttctctatcaccacaccaagaacagcgagcaggcgcgcagccacctggagaaggcggtgagcgcgggccgggccgcgagggaggagtcgcgggctccttgcaagatctgggctgacgggtcgcgaccgcggcgggtggggggccgctcctcggcgacctgggggcgcgacctccgtcaaagccgcaggacccccacccgcctctgccggaccccaaagccaccagcctctcaagggacacgaaagcctcgccccccacgccttatttcccgtttctggtgacagggctccaggagccccgtcaccgtactctgaaagttgcctgttattgggagcaacaggatccgcaaatcgtctggttttcaggaggatcccacctgttggtggcgatggggacatcacagggtcctgaagctattagctcctcctggttcagcttccggagcatcagccccaaacgcttccacctaaagtgacttggggtaggggttggcgaaggcgagacccctggcattctcccgggaatctgaagtctggtctctcaggaacctggaagggcatgattctccttggacacagaagtttggtaatcgtggtttttggagggtcttgtgcccccatcaataatgcctggtgtcgtacgagggaagctgagacccggagtctggagttggtcatttgaggcctatgaggaggagaaacaggggttctggattccaggccccgctgttcagtttcagtattaggggaactaaaagcagctcctgctttttctccatccactggtgacttctaccatccatcagtccatcctcttccgtcagagtgagtccctcccctgacccaacttgatttgtgtcatcttggtgcctcaaagaatgcgggagagtggctgtcattctgccctttagtaaactttctttttttttttttttttgagacggagtcttgctctgtcacccaggctggagtgcagtggtgccatcttggctcactgcaagttccgcctcccgggttcaggccattctcctgcctcagcctcctgagtagctgagactacaggcgcccgccaccacgcctgcctaattttttgtattttttagtagagatggggtttcaccgtgttagccagggtggtctccatctcctgacctcatgatctgcccacctcggcctcccacagtgctgggattacaggcttgagccaccgcgcccggcccctttaataaactttctagggccaggctcagtggcttatgtctgtaatcccagtattttgggaggcggaggcagacagattactagaccccaggagtttgagaccagcctgggcaacacagtgagatcccgtctctacaaaaaatacaaaaactagctgggcgtactgacgcgggcctgtagtcccatctactccagaggctgaggtgggaggatcagctaagccccgggaggtcgtggctgcagtgagcagtgatcacgccacttcactccagccttggtgacagtgaaaccctgtctcagaaaaaaaagataataaggaaaaaataataaaatttcaggctgtggagtcgtttttttctcacagcagcgctgtgatcctgtcagacccctgcctcccttttaccttttacccagctctgtcctgcttgaatagaaaattattgaaaagaatcaactcagattttaaaaactcattaatctgaggtaaatccaagcccaccctcagctagtaacaacttgccttgaggaatagatcaaatctttgtttcacagactgaaaagttggaaggagactttattttattttattttatttatttgtttattttgagacggagtttcgctcttgttgccggggctgtagcgcaatggcaggatctcagcccactgcaacctccgtctcccgggttcaagtgattctcctgcctcagcctcccgagtagctgggactacaggtgtgcgccaccacacccagctaatttttgtatttttagtagagacgggttcacagtattggccaggctggtcttgaactcctgaccttgtgatccactcccctcggcctcccaaagtgctgagattacaggcatgagccactgcgcccagccccagataattttttttcttttttttttgagacagattctcgctttgtcaccaggctggagtgcagtggcgcggtcttggctcactgcaacttccgtctcgtgggttcaagcaattctcttgcctcagcctcccgagtagctgggattacaggcttgcaccacatcatctggctaatttttgtatttttagtagagacagagtttcaccatttggtcaggctggtttcgaactcctgacctcaagtgatccgcccatcttgtcctcccaaagtgctaggattataggtgtgagtcaccacatctggccagttttatttatttatttatttatttattttgagacagggtctcgctccatcaccccggctggggtgcactggcgtgatctcagctcactgcagccttgacctcctgggctcaagcagtcctcccatctcagcctcctgagtagttgggaccacaggtacgcaccaccacacccagctaatttttgtgttttttgtaaagacaagggcttgaactcctgagctcaagccatccacctgcctcagcctcccaaagtgctggaactacaggcttgagccattgtgcccagcgtggaaggcaactttagtcctcacttgatcaactgccttgtttcaaaagggaggcattatgggcccagagaggtaaagtgatttgcccaaggctgcacaacaagttattgacaaaactaggctcaaactccagctcagtgataaccaggttacatgccaagatgatacatcattattgttttggtgaagttttttttcctttgattcattcaacagatacttgttcagctcatgcaggatgccaagccctatttttggtgccgggggatcagcaatggctaaaacagtttctgcccacgtaagcctaggttttcatgaggaagacaaatgataagcatatagtaagaggttaggcagtgatggaagaaccttgagaactgaaccagggagaagagatggagttgacttggagctatttttggcagaggtagtgagagagtctctatttgtgggagtgacatttgagcagaggcctgaatgggtggggcagggagcctggagaaccactcggggggtcaggttgatggcaaggagtgcctaagctgtcggggactggcagatggtatcagggtctctccagggtcatgatgaggctgagatcaaatgaggcaccagactttattgactgggaggggtctggtggcccagcatctccagtggatgtgctggttctaaaactctcctttctctccatgaacaactcccaccacctgccttcccttgtctcccagggctgttcagcctgtttctggcagtggctaatagtcactgtgtgtactgtcgtattttgcccactcagccctgtctaggagaagcagtcatgctgcaaattgctcgctttaccacttggcttttggacccataatttaaacccttctccttgcgaagtgcctttgctctgtcaaatggaactttgaatcttgaagggtcttccactgagccacatggtgccctctgtagctcacgccaactttatgcctggaaatcccgttctttttgtcagtcgcatcccaactgaaaatttttccagcttttagttaaagtaatgttttctatactgttttccttccaccaacgtttgtgaattttttttgtgttacaacataagcatgctttctttcatcttcattctttattaattgtgcattttttcccaatcagggagctatcaacttttattctttccttccccagagctacttaataaagaatcgtatgttctccgcttagaggtggtttgctggtttctacttctgaaaagcaaatggctgaagagattccagtgtcttcttggagagccaacccagtgtaacagtattttgcaatagtttgtgacatttctccttgctcattctctctgctgttctttttatttttattgttacttttattttatttatttattttttgagatgtagtcttgctctgtcacccaggctctggagtgcaatggcgcaatcttggctcactgcaacctctgcctcccgggttcaagcgagtctcctgcctcagcctcccaagcagctgggattacaggcgcccaccaccacgcccagctaatttttgtatttttagtaaagaaggggtttcaccacgttggtcaggctggccttgaactcctgacgtcaggtgatccacccgccttggcctcccaaagtgctgggattacaggtgtgagccaccacacccagcctattttatttttcatttttttgagaaggagtttcactcctattacccaggctggagtgcagtggtgcgatttcagctcactgcatactccacctcccgggttcaaacgattctcctaccacaacctcctgagtagctaggattacaggcatgtgccaccatgcccagctaattttgtatttttagtagaaacaaggtttcatcatgttagtcaagctggtctcgaactcctgacctcaggtgatctgcccgcctcagcctcccaaaatgccgggattacaggcatgccaccacacccggcatctctctgctcttcttcactgaactaattttctctaacataagtgcttaggtaaaacctattattggcccctgaactcagtgctacatccagctttcctattgttttcactgtcttttgctttctctctaagagaccccagcctccttggtcatcacatttttatttaaggttatttctcttttatctgcttctgtcagtttctaatggtctcctcaactgcatttttttttttttttttttgagacagagtctcactttgttgcccaggctggagtgcaatggcgcaatctcaaatcattgtaacctccgccctccgggttcaagcgatcctcccacctcagcctcctgagtagctgggattataggtgtgtgtcaccatgcctggccctcaactgcattttaagtcgtctagaaagatatataacatacttactcgtctacttcatcaagtcaactaactttgaaagaatcatccattaaatgtccccatcaggccaggtgtggtggctcacacctgcaatcccaagactttgtgaggccaaagtgggcagattgcttaagcccaggagttcaagaccggccttggcaacatagcaaaaccctgtctctaccagaaaaaaaaatatagccgggcgcggtggctcacgcctgtaatcccagcactttgggaggccaaggtgggcggatcacgaggtcaggagatcgagaccatcctggctaacaaggtgaaaccctgtctctactaaaaaatacaaaaattagccaggcgtggtggcgggcgcctgtagtcccagctactcgggaggctgaggcaggagaatggcgtgaacccgggcggcggagcttgcagtgagctgagatcgcgccactgcactccagactgggcgaaagagcgagactgtctcaaaaaaaaatatatatatgtatatatatatatatatacatatatatatatatacacaaaaattaaccaggcatggtggcacatgactctggtcccagctactcaggaggctaaggcaagacaattcttgagccaggaagttgaggctacagtgagctgtgatcgtgccactgcactccaccctggacaacagaccgagaccctgtctcaaaactttaaaaaaagaatccccatcagagtcaaagagggtatgtcttcctttcctcagcaactttttaaaaatttgattgtatttatttttatattttctatagagctagggtctaactgtgttgcccaggctggtcttaaactccgggcctcaagcaatcacctgccttggcctctcaaagtgctgggattacaggtgtgagccaccacacacagcctccccaggagctttttttttttttttttttagatggactctcactctgttgcccaggctggagtgcagtggcgcaatctcagctcattaaaacctctgcctctcaggttcagactattctcctgcctcagcctcccaagcagctgggattacaggtgcctgccaccatgccaggctaattttttctacttgtatttatttatttatttatttatttatttatttatttattttgagacagagtctcgctctgtcgcccaggctggagtgcaatggcgcgatctcggctcactgcaagctccgcctcctgggttcatgccattctcctgcctcagcctcctgagtagctggaactacaggcgcctgccaccacgcccggctaattttttatatttttagtagagacggggtttcaccgtgttagccaggatggtcttgatctcctgacctcatgatccacccgcctcgacctgccaaagtgctgggattacaggcgtgagccactgcgcccggcctctacttttattagagatggggtttcactatgttggccacactggtctcgaactcctcagcagcttttttggggtcacagtagttggtgtctcggtgactcttgcctctgtagggcctcagaacacctgccggccgccttgttccctgggtctgctcagcagattctggagctgttacagtgcatggcaggacactttacctgaaagccttccttctctgagtatggttttggcagtgatgtgggtgtgttttggctgctctgggactcccctaagtaaatagttgatgactataagcattgtcactttacttagacatttcttggctagagaattcgcagtgaccaacctgggcactaccctgtctctacaaaaaatttgaaaattagcgggcccgtggtggctcacatctgtagtcctagctacttgggaagctgaggcgtgaggatcacttgagcccaggaggtcgaggcatcagtgagccgtgttcctgccactgcagtccaatctgggtgacagagagagaccctgtctcaaaaaaaaaaaaaaaaaaattttgcaatgccatttctgcagattctgacaggttgtgttcttctatattttgctttcctcttgttctctctcttcttgctgtacacccatccctgtaagttttcattcttctcctctcttccaggccctatggcttttttcttattttcccacctgtcttttaagcagacagatccatcttggtcatttggacatctgctgttgaatcaagagaatgtacctgcatatccgtttcccccttaacttttttttttttttttgagacagagtctcactctgttgcccaggttggagtgcagtggcgtgatctcggctccctgcaagctccgtctcccgggttcatgccattctcctgcctcagcctcccaagtagctgggactgcaggcgcccaccaccatgcccggctaattttttgtaattttagtagagacggggtttcaccatgttagccaggatggtttcgatctcctgacctcgtaatccgcccgcctcagcctcccaaagtgctgggattacaggcgtgagccaccgcgcccagccacccctttaactttcttacttctgatcacagtcccttttatcccttggcctgggaagtgcaccatcattcttaggttttcctggtttgaaagccacccaggactaaatgccgcctctctggaagaacttactattttctataatccaggcagtcattctttgaacagtggtgttttctgactgcgtatgccatgcttgctttctctgtgtcaatgccatgcgtgctttctctgtggttggaacagggctgctttttaatggtggttttgctcatctgacttagaaagcagctccagactgtgctggtcagatacttaattctgcatccaggtttagcctgagcatctatggttcactttctcagcaagtgattaaatgcttccttttctcttaagacccaacagggctaggttctgagcctctcctcatcaggcccagcgtaagcagttctttcattcttcaggatcacaactgtgtcctgctaaattccgtgtcccatctgcagggagcagagacttgtgcagagctggccgttacgcagtttcatgaagtgatctgtgcttcctcctgtttttgtttctatttccttccctctcactcttgagtcacctctgacttcaggatgtgaaatctgtttaggaaccatcacctcacggttctaccagctggtcccttcctctcccaccccggttcttctacttcctgattgccagttactatagcatcattggcacctactacatgccaggccctgcattggtgcttcacagagcaaggtctccctggatcctcaacaaattaacagggtaaggcccacctcagactcacctgtgatgacacccagccactgcaggagaatgtgcttagccacagtcacacagcagcaagaggccagggaagctgctaaatgctgtgcttccatcccagaggtgttgcaagcaatagggtagtttaaaaaaaaaatgattttgagccaggcatggtggctcatgcctgttatcctagcactttgggaggctaaggcgggaggagtttgagaccagcctgggcaacatagccagaccctgtctcttaaaaaaaaaaaaaaattgaaaaattagccacacatgcctatagtcccagctacttgggaggctgaagtaggaggagtgcttgagcctgagaattcaaggttacagtgagccatgattgcaccactgcattccggcctgggtgacaaaaaccctgtctttttaattatttatttatttatttatttatttattttttatttttttgagataaagtctcactctgtcacccaggctggagtgcagtggcgcaatcttagctccctgccacttctgcctcctgggctcatgtggttcttttgcctcagcttccagagtagctgatgtgacaggcacacaccaccatgcccagctaatttttgtatattttgtagagatggggttttgccatgttgcccaggttggtctcaaactcctgagctcaagcagtccacctgtcttggcctcccaaagtgccaggattacaggcgtgagccattgctcccagccaaccctgtctcttataaaaacaaaacaacaacaggccaggcatggtggctcacgcctgtaatcccggcactttgggaggctgaggtggtagtatctcctgagcccaggagtttgagaccagcctgggcaagatagcgagacccccatctctacaaaaaagtaaaacaattagttgggcctgccaggcgccatggctcacgcctgtaatcccagcactttgggaggccaaggcgggtgcatcacctgaggtcaggagttcgagacctgcctgaccaacatagagaaaccccgtctctactgaaaatacaaaattagccaggcgtgatggcgcatgcctgtaatcccagctactcgggaggctgaggcaggagaatcgcttgaacccgggagccggagggtgccatgagccaagatcacaccattgcactccagcctgggcagcaagagcgaaaattcatctcaaaaaacaaaattagtaggacctggtgagatgcacctgtagtcccagctacttgggagaccgagccaggaggatctcttgagcccaggagtttgaggttacagtgaggaccactgcactccccctgggtggcagagggataccatgtctaaaaactacaatcaaaaaaagccttttttttaaaagttactttggttttaaggaataagaagccttgaaacactcagccctggactgaatcctccaggcaccagagctgtgctggtctggacccttccaccccacttgaaacctgttggccctgttgcaaccctctcttgctttccctgagaaccctaaggtgaccccaggggctgctgatggagacagtcacctccttgccctgctccctgcagcctctcactttggctgctttgctatcataaggaaggaaacataaaagctactttttagcattacaaagttaaaaaaaaaaaacacccgggcacggtggctcacacctgtaatcccagcactttgggaggccgaggcaggcagataacaaggtcaggagaccgagaccgtcctggctaacatggtgaaacccgatttctactgaaaatacaaagaaaaattagccaggcgtggtggcgggcgcctgtagtcccagctactcaggaggctgaggcaggagaatggcgtgaacctgggaggtggagcttgcagtgagctgagatcgcgccactgcactccagcctgggcgacagagtgcaactccgtctcaaaaaaaaaaaaatcacgtagatgaggtagcaaccttgggtaaggcattctacatcctttatttgtgagatggatatatttttctgatttccaaatatatgctacaagtcatacagagggctgggtgaggtggctcacaactgcaatcccagtactttggaaggctgaaatgggacgatcacctgagcccaggagttcaagaccagcctgtgcagcatagcaagaccttccctgtctctacaaaaaaaaaagaaaaacaaaactctaacaaagatacaaaagtgaagtcatttagtaggtgtcagattgatggccctggggaattgactggctcaccctgacaccaggcccatactgcccttcaggaatgtgtgtcctcatgcagagagatccaggtgtcactgatgtcccagtgaagaagcagtggcatttaaagacagggagaaatcccatgccatttagggctttgtgtctgaaaggcatacgcctccgttctgtggccatttgcacttacacagaagccctcactttcctctaatgaactctactcattatccaagtggataaagccatcgttcgatcagcagatgtttcccgagcacctactggatgtcagcttgctgcaggcattgcagccacaactttaaagtcaaacatcatggggcttttttttgtaagagtcagggtcttgccctgttgcccaggctggagtgcaacagcacaatcatagctcactgcagccccaaactcctgggctcaagtgatcctcccacgtcagcctcccaagtaactggcattacagcatgcaccaccatgcctggctgattttttttttttttttttttttttagagcgagagacagggtctcgctgtgttgcccaggccggtcacaaaaagaggggctttatctaatgtcctctgtttgtatgtatttgaagtgggcgataaagctacatgggaaacggatgttaaaaagcgctaggatgtaatttctccagtgccttagagcatcgctaactcacagtggatccacaccttgaacccaatcctctggctcccagtcagcgctcctgacacccactgacgctagtggacgccttccacaagagaatgcttgtatttggagcctttgggcacattacttcccagctcaccagtgctcactgagagcctccccttcctcaggggagatgggatcctctctgtctagcccacccgtggacggacggagctggcagagaggcgagcccgttagcagcaggcatatctggcttgtaaagaagagatgtcttggccagccgctgcggctcacgcctgtaatcccagcacttcgggaggctaaggcgagcagatcacctgaggtcaggagtttgagaccagcctgaccaacgtagagaaaccccatctctactgaaaatacaaaaattagccaggcatggtggcgcatgcctgtaatcccagctacttgggaggctgaggcaggagaatcacttgaacctgggaagcggaggttgcggtgagctgagattatcccattgcactccagcctgggcaacaagagcgaaactccatctcaaaaaaaaaaaagaagagatgtccatggggtcaggagaaatgaggtccagtccaactgtgtgctgaatagattgatgttagccacatcatggccccaaatggagaagggacacaaagctgttgctggccaagcacgatgtccaacgcctgtaatcccagcacctttgaagcccaagacaggagaatcactcaagcctaggaactcgagaccagtctgggcggcgtagccagaccccatctctacaaaaaataaaaaaaattagccagacgtggtggttcgcaccagtagtcccggctactcaggaggctgaggtgggaggatcacttcagcccaggaggtcaaggctgcagtgagctctgattgtactgctgcactccagcctggacaacacagtgagactgtgtctcaaaaaaaaggaaaagctgttgctatgaggagacattgttggacccacatgggcctgagctcggtggcataggccaaagctttgtagaagggggtgtagtattctgaggcatgaagtgactggacatgtccttttgaagtctacccgccacagacatgcacgtgtgggctgtcgtcagctctggggagagcatcccatggccacagactggaaaggaaagcttctccgcccaaagggaggagggggaattcacgtgttgactggtcgccttgcttacctctgctgggatgcagtgacagaaatggggccagctttgtcacaggtgccaggcttagctgcaggtgccaggtttgcaccttgctcacccaggctggggctgctgcttgtgtgtggcagtgctgtctaccctggactgtgtctgaagagctcccccttgccagccccatggtgcccaaatcagaaccaccaaatctcagggttcagggagacctcagcccagctctagtacggctcctctgtcacagtcccctctctcctgtgtgattgggcatcccttccagttggtggccttccagagcttcttgtgttagacccggcttctcagtgggatgcagcagcttctgtggaaaaaagcccccaacttctgctcttctgttgcatcacacacgttgccactgtccccacacacagcctctagctgaggagcctcacctctggggccacacttctgacggcaggtgctggccccgccactctgaggaccccgagcccctcctgtccgtgccacaagaggggaccacaggaggcagacgcttgggctggcagagggcctgtggtctgggctcctgcgtgtgggtgcatgtgtgtcaggggctcgggctctctcccacagctgtcctcctggccccctgtgtcttggcagtagctgctctcgatgcagctctgtgctttcccagtgcctgtgacattcccagctgctgctcacccttgccctagagatctccagccccaaggctgcccccagccgtggatctccaggcctcactggctcctccgcactcccttcgtgaatactctctgctgcatccaggatggtctgaaaactcccatctgggcaggtgctttcattttccacccctgactgagtcagcttccaggggtgacaccagggcattctgaccctcagctaggagtggccgctgttgccgcatgagtggcagagaccatcgggcttcagcctcacctccctggccctctgccttttttatgggcttttcagtgcctggagcacctcctgctcccccttttcctggagaactggcccctcacttcccatacttgccacacatgctgccctgccccatgcagtcctcccacagagtgcgatgagttagggtctcctgctgtgctccggatccaccttccagcaaccaccgaggctcttgtcaggtgcaggttgctctgaatgtgtgtggcacatgcgagtcgctggggacagcgttaggcttgtgtgcttgggaccctgggtggtctgatgggctgtggtcagtggcctggactagcctgggaactgttggaacatggaactttagggcacagtggtccctgagttggagcctgttgtctgaactgccttcctggtgtgcatcttcagtgccatcccgcagttctgcctgtgtcagcccttcctggagccccctccctcccctctgagagactgactttgcttatagccaagcatctttcaaatgcctcttgctcagaaggactaaccttgccccccaagacccattctccagttgaaactgatttctcgtgttatgctttgctgaacgtccttcctctctgcctgacctctgactgccagccctacttccgtgtgacacctgggggccttgctgtggccaggtcacctctgagctctgttcctttctgaagcagctcccacccatgggcctgtggggtctgactccaagtgcgagcccctcctctgatgtcagaagggcatgtcccctcctgcccaggcacccactggggctctatagcttccattcccctggctggattggaggggagtaagcctaccctctcaggccaagcgggccgccttcttgttacctggatacctggcagcctctgttctcaggacaacctgtggaagccccagagcgagccagtaaccaggtgccaggtgtttgcctgagaattaatcgttgttttctttctttttcagtggttgatatcacagcaagtatcctttccgtgttggtatggttccctttaaggaattctccacttaaataaaaagaatgtatcaaagcttgaatcccacctcccgacatgccctgtgagttgaggctcggcccacagagcacctggagtgtcccccacctggccctctgctgcccttgggcgctgtgctcctctttgtgcttctcttcgtaccttgcatccagctccaagccctgccctgcagcaagctcaaggttcactgggggaacaggaaaacttggaatttcagggcaggcagggacgtgtgtgccctgcagaccttggcagggtaggagccccaagctgtggccctttcaaaccgacctttttcgcagtgtctgtacttccttaactggacgtcactagatcccgcagttcgaagatgttaaatttgaagcagcaagtctgttgtctgaattgtactgtcaagaggtaagaacatattaaggtttctgaaagcaaagtgtctctccgtgtcgctaagacatgacagcacattggtaaattggggttccgggagttggaatccctccggctttttttgtttttttggtcggggtgggaggacagggtctcactctgtcgcccaggctggagtgcatggcacaatcatggctcaccgcagccttaaactcctgagctcaagtgatcctcccacctcagcctcccgagcagctgggactataggcatgcaccaccatgcctggctaattttttttatttgttctagagatgatctcgcccaggctggcctcaagcaatcctgcctcgacttcccaaagtgccaaaattatacacaggaaccactgtgcccagcccggtggcttttaacactcagattactttcctgcctcttatgccccagccccagggctttggtgggtagccacctgctaaggagggccagcagcttccttttctacataagactgttggaaagatcagcctgttcctcacctgacaagtctgtacagtttctcttcttaatctggttcctaatttcaattgtagccgaaatctgccttcctcccacctcagaatgatgacgggtaaggtggcattggcagcagggaatgtgtgtgcttcacaccctgatgcctctctctggtctgagaacataaaagaagggaactggcgtctgatttgagtgtttagaattttgaactgaaactactttcagtccagttgaatgagaagttattttaagagtgatgcagaaacttcccagccagtgagtccaataaaatatctttttttacttttaataaagtaaattggcaaccccaaaaaatcctttggtaagcatgaacaggaactgccttctggcaccacagctgctgctaaggaatccagcttgattgccgccttgttttttttttttcttacattcccaaacgtgactatttcctttcagaattccgttgatgcagcaaagccgctgctgcggaaggcgatccagatctcacagcagaccccatattggcactgccgcctgctcttccagctcgctgtgagtaccgcggcccgggaacgagggtgcccggcagggaccatgaccctggggcacacctgccccatttgcaaagaacagcagagtccacgatgcgcagaccccctcgggctggcacatggagtaggtggggacatgggaacatttccttaacctgcacacaagcccctttcagcctccatccttgagagcatctctggcttgagcctggctctcggcaacacccaggggtgagtggtgggagtgcggggcttccccggggccaacactgacagcgggcctgctgcttgttgggtgtctttgggttcccctccctcccagccgttctcatctcatctttggcctgcactcattgaaatcccaggaacatttcctgccagagacccactgtgggttttttttaggagctacactgagactccaaggggctgcctatcaggccacaaatggccatgtcaagcattgtgtcccacatggggcccctcacgttggaggctgctggggcacaccctcatcctgggatccacacagttcctcctcatgctccctttggcccccccagatataggtgaagccctggtctctgagctccacagtgctcggttgttgggggactctgaactcggccttcccggctgcagtggaggggccggcaggctccaccacgtggggcacctctcctgtcctgggctccacccatacttctgcactggggaccctcaggcgggtggccggcccccggcctctctcttccatgacccagcctgccttccgggccaccacttagccacctcccatgacacctatgcagtatgtggaccctgggttgggagttcctccagctgagtccctcaccccaggagggtctggctgagaaaagtacgcacagggaagagctcccccagcagccaggagttcccgaggccctcctcccccaggcctgatgagaagctgcatacacatgctgtgtccttccatctccccacgcactcttgtgcccattagcagacaaaggagcaggccaggccgtgagtcacctcccctgggccacagagttggcaggcaccatgtgcacgcacacccaagggccgagctcttcaccacagccccataggtattgccttgcagggtcaagccaggcatgtgcctccctttcagcctgttcagactttgacacttgcctctgagggagtccctccttgtcggccctggaacacactagggacaccccactgaagacagaccccacaaagcactcagaacagccttaggtgctcacacagccttgggggtctgtgccgtgagccttggctgctggttctatgctccattaagtttagatagtgtccactgcaggcaccattcagtttagatgacatatatactacaggccaactggagctgtgtacccaaagcaattagcgttgataagataatttggttaatttagctcaaaactgacacaggcagtttcactgacgtggggaggtttggttgagtttgctaacagagcacgaaggcaggtaccgtaaaactgatgggtttggcagcaaaggtcactgctctctttcctttttagcaactgcacacgcttgagaaggacctggtgtcggcctgtgacctcctgggtgtaggggccgagtacgcccgggtggtgggatctgaatacacacggtaggcacccactcccctccttccctcctgctctgttaacaggaggggcttggccatcttggtccaggacaaataacagaaatggcatttcaggtgaagtacagtagctcacagtatattcccagcactttggaaggccaaggtaggaggatcacttgagcccaggagttcaagaccagcctggggaacatagtgaaaccccatctccacaaaaaatacaaaaattgggtccgggcacagtggcttacgcctgtaatcccagcactttgagaggctaacgtgggaggatcacgaggtcaagagattgagcccaccctggccaacatggtgaaacctgtttctactaaaaatacaaaaattagctgggcgtggtggtgggtacctgtaatcccaggtactcgggaggctgaggcaggagactagcttgaacccgggaggcagaggttgcagtgagccaagatcatgccactgtactccagcctggcgacagagcgagactccgtctcaaaaaaaaaaaaattagtcaccatgaggcgcgggtttgagcctgagttcaggcacccaagcctgcccactggccccaacgctgtgtgtccaccgccgcgtttttttttgttgttttttttttgtagagatagggtctcaccatgttgcctaggctggtctcaaacttctgacctcaagtgatctgcccaccttggtctcccaaagtgctgggattataggcatgagccattgcacccaaccgccttctgggcttttcacgtgagtgcgtctaagccatgtaagaaaaataaatacaggccaggcacagtggctgacacctgaaatcccagcactttgggaggccgaggcaggtggatcacatgaggtcaggagtttgagaccagcctggccaacatggtgaaaccccgtctctactaaaaatataaaaattagccaggcatggccgggcgcagtggctcacacctgtaatcccagcactttgggaggccaaggtgggcagatcacgaggtcaggagatcaagaccatcctgtgaatggtgaaaccccgtctctactaaaaatacaaaaaattagctgggcatggtggcgggcgcctgtagtcccagctactcaggaggctgaggcgggagaatggcatgaacccaggacgcggaggttgcagtgagctgagatcgcgccactgcactccagcctgggcgacagagcgagactccatctcaaaaaaaaaaaaaaaaaaattaaccaggcatggtgccaggtgcctgtagtcccaggtgctcaggaggctgaggcaggagaatcgcttgaacccgggaagcataggttgcagtgaatcgagatcacaccattgcactccagcctgggcaacagagtgagactctaagaaaaaaataataaaaaaaataaaaacaggccgggcgcggtggctcacacctgtaatcccagcactttgggaggccgaggcgggtggatcacgaggtcaggagatcgagaccatcctggctaacacggtgaaattctgtctctactaaaaatacaaaaaattagccgggcgtggtggcgggcgcctgtagtcccagctactcaggaggctgaggcaggagaatggcgtgaacctgggaggctgagcttgcagtgagctgagaccgcaccactgcactccagcctgggcgacagagcgagactccgtctcaaaaaaataaataaataaataaaaataaaaataaacacagacacaataggataaaacagagcagtcttgtaaggggactgttctctgttgtccactgaactgtcccctgaggtggcatattaggtcctgtgagccttggggtaatcacagtcatcccaggaggctcctgggcctgctaggacctgacccctgcctcttgttttgcagggcgctgttcctcctcagcaaggggatggtaagttgaggctgggcatggctggatgcagctggtgttgtggaggtgaggcagggcccccacagagtctgctcagaccccacccactctccatggcatggccccttaggcgcccagacccttaggcacagtgagcagcctggaatgtgaggcccgggccctgctgggttcaggagggaaactcaggctgcaccctatgggattcatgctgaggcaagagcctggttaggagctgcctgggctggggtttcaggctggccttgccctctggattggtggcagcagtcccagggcaggtgggcaggtgaccctgtgctcccggtcctgggagggcccctgcaagccctgtaccctacacctgcgcctctccctccccagctgctgctgatggagcgaaagctgcaggaggtgcacccgctgctgaccctctgcgggcagatcgtggagaactggcaggggaaccccatccagaaggagtcgctgcgtgtcttcttcctggtgctccaggtcacccactatctggatgccgggcaggtgtgtggcgcctctcaggcgagctgctggttgtgaccagtgggtatgggtggtacccaggccaatgggtcttgggctgtgaggtcagctgtgtcatcgccttaccttgccacacaacagggctgtcataccagtcccggacacacacactcctgtcctgctctgccacgagtgctggtatctgggaacagggtctgtcctggccaccccacctccctttgggagtactatgtgtgacattgcatacactcgctcagtgtatggatgctcagagattccaatggcagttcagggaatcatgagaataaaccacagaggtgctgggatggcacctgcacacagcagatgcccaggtgctgtctgtctggcccccggctgtggggttgagtagggactgatgtgctcagccatgtccgagactggactcatgaccctgccgtgggtggggagcggctgtgtttgagctccttgtctctgtgcttgtgtgacagtctcagcccttcgggggctgggggctgccctgtgccactcagacccacccctgtcgcagtgggccacaggcgagtctccacagggcttggtaagggggttgcccagttcgtccatccatacccatcgttgcccattgggtgaagcactgcactcggcgcatagggacacagagcagactgcagccacgcttccctcagggtgcaagggctgcagagacatccctcggggcctcagggcgagatggaccacagcgcctgcctgattcctgggccaggaagccacctcccaccccctcagagcacagcctccccctgccgtctcaggtctggctgcgtgaagaccaagtgcagctccagcagggtctggataggcctctcctgggccttggtgttggacccaacactgggcagtggacaagcctcagtcccacagctgcccgcctggctgtgccccatgccccaaaagcctggctgattcatgggagtgcggcaggggcggcttcatcttgcaggaggtggccctggcagaaggggaaggcagatgctccctagaggaaggagcaggggtggctgggctgggcctggcttcctgagaggccaggctcaggtggatgctcgggtgtgggtgctgcacaggtgaagagcgtgaagccgtgtctgaagcagctgcagcagtgcatccagaccatctccacactgcacgatgatgagatcctgcccagcaaccccgctgacctcttccactggctgcccaaggagcacatgtgtgtgcttgtctacctggtgcgtccccaccagggcccgggccagggctgggggcgggggcagggagagggagagggccctggtaacccctgctgtctggtcttgtcgctaggtgactgtgatgcactccatgcaggccggctacctggagaaggcgcagaagtacacggacaaggccctcatgcagctggagaagctcaagagtaagtcaggtgctcggctggccacatggccacagcgacccctggcggacggcctggccagacgctagctgtaccagggcccagtgaccctgtgtgaccgcagcgcccagccaccctgcctggtgggtctcgtcacccctagttgataaatgctggtgtccaacgtcagagcagagcagacaggcctggggtcgggggtacctccctgactggtcaggtcccttgtgcccagtcatgctcagttgaaacaggtggtagctgcttttcccaattattatcagtgttgtgacagggacactcgggatgaggccaggatcagaactcagccctcactgaccaccagcatgtcctttggaggtcgtgagttctttccagatgctcaagtgtctaatccatccagggacctttgactagcacaaacccagagcagacgtccctggctggtatagtgtgcccattagtcggtctgtttgctccctcgtgagtgctgctgggggagaaggcatcagagccaaggcagcccaaagccggataggccctgtgcttctcttattcccatatgaggatggttgcttggggctgttgggaggtggggcccagcccaggtccccctacccgactgcctgaggctctgctgcatggtgtcatgatccagggtggtttccacatttctacatttctagaacctgccatgtccacaagctcttgagcacgtagggtgagggtgagggtgagagccaacccttcttggagcactgtgggaaccaacctctggctccagctccgtctccccacctggacagcaagacacactccttcactcagagggtgcagtggggactaggggagatgacggggtgggtgcctagccagtgtggcaggagacaggaacgaggtgggggcacggtgggctgggggtggcgcctcctctggcctcccctgcatgcttacccctgactctcacccatagtgctggactgcagccccatcctgtcatccttccaagtgatcctgctggagcacatcatcatgtgccgccttgtcacgggtcacaaggccacggcgctgcaggaggtaaggctggaagcaggaggggcgggaaggcccaggagtttgttgggtctcagcagtgtcagacaagagactgaattcgccaagtgcatactggcaggccagcccatcctgctgtctcgctgtcggccagcgttttacagccctgcatgggcaccactgatcagagaatctcatacaaaaaccagtggaggccgggcgcagtggctcacgcctgtcatcccagcagtttgggaggccgaggcgggtggatcacttgaggccaggagtttgagaccagcctggccaacatggcgaaaccccgcctctactaaaaatataaaaattagccaggtgtggtggcagacacctgtaatcccagttacttgagaggctgaggcaggagaatagcctgaacccaggaggcagaggttgcagtgagccgagatcgcactactgcactccaacctgggcaacagagtgagactccatctcaaaaaaaaaaacccaaaaaactaatgggccatggcccaaaagcttgcacaccaaggggatagcgcacatggtctctggggatttggggggtcctttgacagtgattgttataccccaccctgccattaggaacactctacccccagtacccaccctcctgagagggcatgggggccctcagtaggctggaggtcctttacaacccagacacctgttggacagagtggaagagacgagtaacagacaagggtccctgtccacgatgggatctgggctgccctttgccctcatggtggacgtgtctgctggggctttgtaccccagtttggtcagacaggacatgggctcacccaccagctatggggtctctccattgctgctcagacgccaggtcccaggttgcagtcctgtgatggcagtacactctctcccggcagatctcccaggtctgccagctgtgccagcagtccccccggctcttctccaaccatgcagcacagctgcacacattgctggtgagtaaccctgtgacaacaccccgggagaatccagaatgttctcagtaagtaagtacctaaccagatccagaacattcccagtgaaggaccccctgacagcaccctaatcagaatccggaatgttcccataggtaatcatataaccttcccaggcacgatccggaatgctcccagtgagcatcttgtcccaccccacattggcttgggtctgaaaggtggggacagtgagcatattacctgccttgcagctggctcggtagagccattgtcatactcctccagggcagccgtgcaggccccgggcacaccacgtgtctctgatctgagccccctccccaggggccggccctgatgacaacaccaccttcttccagggcctgtactgtgtctctgtcaactgcatggacaacgcggaagcccagttcaccacggccctgcgggtaaggtgccggccctccttgctgctcggggcgggccacacttctgagtaaggagtcgggcgtggtctgtgatgaggacagcagtcgcgctaggtcagctatgcaaagccgcagccccagaggcaatgcacagtagtcagcccatgccagccttggcagtgacgcgctgtttatctggataagggacagctatggggccaggggcttcctgagctgacccaagggcagacgtgagggagaggtgcgacgcgtccggggacaccactttcatgcctgagtgggaacttttgcggcacccacccccaaggctggattggctcaagtgtcagctgacaactcagagccatcctgggttcagggctcccatggggagtggtggagctgggccatctcccaggtgctctttggacagaggaggactcttggtcctgctgggccggagagggtgaagcagcaccccaggctcctggccttagacgggggccccgccaggccctggaagaaggctggtgccacatcctcacggagcgccccagcccagggctggaccattgtgtccccacctcagcctcaacctcctcacaggaaatggaggctgtggacacctttttcctggtggtgccaggaagggccctgaggagaggtgtcagggagcagaggctgctctgtctgccactcgggcaaggtcaccagggagtcctgtgtgcgccctgactgttggacagggttcccattccacggcaccccgcaggcctgtgggtgctgccacccccgccactggcctcagagatgcacaggagccctgacatgcagacagcatgcttgggagggaagggctgactcagcacccactcctctgcctcctcacctcgctcccaggaccctggctcactctgactgcagcagggccaggaccctcctcgtggccctgccatcctgccatctccgtctccgtctcactccccacaagtggttgctattgctggtttggttccgcgtcaaagttcccaaggccatgtaccctaaggagtcctcaccccgaggccaaaagagagcctctttttcatggcccacccaggagtgatggagccaggatgcaaccccaacacccctaaccccaaacacacacgcctcctgtggccctgaaacaaacatctcccaccttgctacgtctcagagcatctgtgcttgattcggaagatcctctgggcctcctgggtgtgtgccaggaggggatctgtgcaggtggggtctgtgcttcctgggctcactccacctcttgcccagccccactgggaaccagggtctgagcagggcttgagctacatagattggaccctctcttgacgaacgatctcatttgccaagaagagccagggaccatggcccatccaccacctgtcatcagcagcatttctggtctctgacacagcatcacctacctggagcggggcctgtgctggccccctgtgggacaacagctcccctcttccccacttccccctatgaagagtgacccccgcctaggaccagcatatgccttgatggcagtggacacctgggtcccacaggttgctggctgtggcctggaggaagggtccaccaggtctcagtcctgagagacagtggaaaatggaccaaaacccgacatgttctgagggtaggattggggtggctggttttcctcttctgtgttctctaactgccccgtaacgcagatgatggttttataatgagaagaagtaatagctgtgttatccttgagcttaggaggcaaaacaagtgtgtttgaaatgaaaagaacaagtcttttccaaagtagtctccgtggagattgtgggtgctctgacactgccacatgggtcacagcacccgacccagccccctaatgtccccgcctcccattccagctcaccaaccaccaggagctgtgggccttcatcgtcaccaacctggcgagtgtgtatatacgggaaggaaatagacaccaagaggtagtaggtgacatgcttcatgttcggtatcctttctctctgttctcttctttttggggaaccagggggttgtcctgggcaccagcacatctcagcagaccccagggtgttcaccttttgagggatgggcggcacccgacacagacacacaaggcgacccagaggtgaatcgggctatggccgggggaggccaggtctgggacaaaaacattcccatagccacagaacacttctctttatcacaaacaaaccaagctgtatgaatcacacagacaaggtcttatagcccaagctgtctgctctaggatgtcggccaggcattgaggctcagtcctaaggggcagcagccagagcaccttgtccccaggttgtgctgatgcccctgcaggatcaggggcactcactggctgcagtgttgggtggggatgcccagggttgccctcacgtggcgcttctgaaccaatgcttgcataagagttaggttccctcttctgtcccttttagccctgggatccccactcagccctgggatccccctcagccccgggatcccctcctcagccccgggatcccctcctcagccctgggatccccctcagctctgggattccctcctcagccctgggatgcccactcagccctgggatccccctcagccctaggatgtccctcagttctagtatctccttcacctctgggggtctacctccaaagtgtatcaggccaggtgcttggctcacacctgtaatcccagcactttgggaagcaaggcaggaggatcacttgaggtcaggagttcaagaccagcctgggcaacatagggagacccccatttctacaaaaaaattttttaaaaacttggtggggtgcaggcctgtggtcccaactactcgggagactgaggcaggaggattgcttgagctagggagattgagggctgcagtgagccatgatccagccactgcactccagcctgggcgacagagcaagaacctgtctcaaaggaaaaagaaagcccagccccggcttagtcatccgatgccatacgtgggctcgcagtgttgaggaggagtttggctcccctgtgcctctgcagctagagggcagctaaattatcagtcagatcacgcccccatcagagcctcccggggtccctgcacctccagagaaatcccacccactcacccccacagcccacagggctcacgggccccagcctgccaacctacccactgccaggccagcccctcagcaccactctgaccatacaaaggccttctggacgcccaggcccctgtcacctactgcaggacagggtggcacaggcagggctggctgagggtgtggaaatcttgcccccggcccttctcaccagaggctgctcttgctggtcagtcaccaggctcagcctggaggccacagtcccgacgggggtgtagagaaattcccatgcactgcagtgtgtcttggggacctttctcctgtgaagatgcagaatggtgctgactggctctttcccccgcagctctacagtctgctggagaggatcaacccggaccacagcttccctgtcaggtgagccgctccaggcaccactccacgcacggcctaggctccccgtgctctttggttggggcccctgactgccccttgcaccctgacaccccatacccctcctcacagacagtctgcagtgggggctctcagaaatagcccccagctgcccactgccgttttgtaaacctgcttctcaaaatcaccaccccatgtgatactgcactctccctgcagctcgcactgcctccgagcagccgccttctatgtgcgtgggctcttctccttcttccagggacgctacaacgaggccaagtaagtgtggggcagagggtggcgtgagggccatgctcagggtagcccaggccccgtcctgcagttatcagcgtccatgttctccttgtcaggcgatttctgcgggaaactctgaagatgtccaatgctgaggacctgaaccggctcacagcctgctccctcgtgcttctgggccacatcttctatgtgctgggaaaccacagggtgagtgccctggcctgggcccctcgcttgggtgcctgtggggcttggctgagggacaggagccggccagcaccctaagggtggcatggcactgttcatcctatgcccctcgaagagcacgtctaggtggatgccctgactcccacagcctgggcaggcagggccagaggagctgggcacccacagagggtgtggggggaaggcaggaggcctgatgggtgtggcctcagacattgggcaggcagagccccagggctcaggggagctgaagccagaaccaaaggagctgccctgagctactggggatgacgcagccaccccatgctatgtgttgacacctgaggggcagagaggtgtctcctctcagccggacttccaaacatatcatccttggccaacacagtgtcctctcagggtacaagtggcccctgggattggtccccacccaaggtcagccagtctctggtgggactggccgcctcagtccttcctgtcaattcctcgcctactctcacccactgatctcacgaggtcttgaattttttttttttttttttttttttaagaagatattttgggcaggcacaatggctcacgcctgtaatcccagcactttgggaggccaaggcgggcagatcacctgaggtcaggagttcaagaccagcctagccaacatagtgaaaccctgtctcttactaaaaatacaaaaattagtggggcgtggtggtggacgcctgtaatccaagctactcgggaggctgaggcatgagaatcacttgaacccaggaggcagaggttgcattgaacggagatcatgccgctgcactccagcctgggcaacagagtgagactctgtctcagaaaaaaaaaaaaaagatgtttttgggacaggcacggtggctcatgcctgtaatcccagcactttgggaggctgaggtgggcagatcacttgaggtcaagagttcaagaccagcctggtcaacatggtgaaacctcatctctactgaaaatacaaaaattagccaggtgtggtggcacacatctgtactcccagctattctggaggctgagacaggagaattgcttgaacccaggaggcagagaggttgcagtaagccgaggtcgtgtcattgtactccatccagcctaggtgagagcaagactccatctcaaaaaaaaaaaggccgggcatggtggctcacgcctgtaatcccagcactttgggaggccaaggcgggcagatcacaaggtcaggagatcgagaccatcctggctaacacggtgaaaccccgtctctactaaaaatacaaaaaattagccgggcatggtggcaggcgcctgtagtcccagctatttgggaggctgaggcaggagaatggcatgaaccaggaaggcggagcttgcagtgagccgagatcccaccactgcactccagcctgggcaacacagcaagactccatctcaaaaaaaaaaaaaaagatatttttggccaggcacagtggctcattgcttgtatccctttgggaggtggatgggggagaatcccttgatcccaggagttcaagaccaccagcctgggcaacctagtgagaccctctttttttttaatttaattttattttttgaggccgagtctcactccgtcacccaagttggagcgcagtggcatgatctcagctcagctcgtggtaaccttcaccccctgtaggctcaagtgatcctcccacctcagcctcccaagtagctggggccacaggtgtgtgccaccatgctcagctaatttttttatttttggtagagactgggtctccatgttacccagactggtcttgaactcctgagctcaagcgatccacccacttcagcctcccaaagtgctagattacagcatgacccactgtgcctggccctagagatgctatctcttaaaaaaaaaaaaaagatattttccagccagacacagtggctcaggcctgtaatcccaacactttgggaggcagaggtggaaggatcatttgagcgcaggaattcaatatcagcctgaccaacatagtagatctgagatcccatctctacaaaaaccaaacaaaaaaattagctgggtgtgtggactcatgcttgtggtcccagctaattgggaggctgaggtgggaggatcacttgagcccaggaggttgaggctgcagtgagctgtgatcatgttactgcactccagcctggacaacacagtgagatccgtctcaaaaaaaaaaagttatttttctagattataaaatatgacatgttcataattaaaaggctgagaagcaaaacagaaaaaaattgcatgtctctgtcatccatcccttcccactgcccacgtctcccacgtggaggttttgcttgtcagcctgtttggtaatttttttttttttttttttttttttttttgagatgaagtcttgctctcttgcccaggctggagtgtagtggtgtgatctcggctcactgcaacctctacctcccaggttccacggattctcctgcctcagcctcccgagtagctgggattacagtcgagcaccatcacacctggcttatttttgtatttttagtagaaatggggtttcgccatgttggccaggcttgtctcaaactcctgacctcaggtgatctgcctacttcagcctcccaaagtgctgggattacagacgtgagccactgggtaattttatatttgcctttctccacacctctgtattggaagcttttttttttttcttaatggcaatgagtgttttgaagccacatctactctgtagtttaaccattctcactgtagccatttccacaggacagataaagcaagatgtgtgtcttggcctgtaaagtttcacgtgatctgagggctccctcagcatggatgctgttaacaaacgtggtgcccgcccaccgcaacacacagacacataactgtgtggtaagcctttgcagaggccagcgaatgggccctgcagctcaggccctggtgggccttggcctcagcactggggatgccactaccccgtcaaaacctgtagctggctccttctagaatgtgctatcaccctgccctcagcctctgagcacagtgagggctgtatgtccccactggacagtgcaagtggcctgggggtgtgtcagatggggaggttaaagtcacacagccccagaccgcagaatcaggactggaacccagacctcactggctctgatttgtgtagaaacccctggaagctgcctggagcagggcaaggagggttgagcagctggttcactgctgctcctggcccatgttttaggtgttgtgggggcatcttacagagctcttttgggaatccccctctgctccctgtgtccctgggcccttgtcgggtgacaagcggcgcccaagaactctcagaccaaggtcctggccttaagtgactccagatctcggggagacacagccagacacagccaagccagtcctgtgaggtcaggctggggacatccagaaaggtggcagccttgggggccgggatagtgttggtgcaggcagggcaaggttggctaggcaggggctgccacagagatgggcaccacagcagtcagagcacaagtgccggagcagacggctgaatggccacaatgggctcaggtgagggtccaggggcccagaagagcttgggatgccctgtcctgagcctgttaggctagagtgtccacaagagcgggacaccccccaggatcactcaagtcttcaaaaccagattctgtggggtaccccaagctggcattgggggaacctacccaggagcgctgaaggaggactctccttccccaggctgctttcagacagaggtccttggctttctacagggagcccagccaggctcacaataagccaggcctagcggaagagagcagtttttcttgctctgaggtttcaaaagggcttggtgaattttaaaaagctccaagacccacctggagctcactttcaaggtgcagctacagggcagtgtagagttgttgggctttgtgtctcaggaggagcatctctgcactctggagaagtatctggtggcgtcaaagccaggtctcaggagttggttttggggatgtgtccatcttggcttcccaagtgctccctgggctgccaggagccatcatctagggaattttccaggtcttacctgaaccccacatccaggcttacagggctttgagtcctcggtccagacagggtcagtccagcactgctggtcgcctgtgtagcacaggctcctgtctgccgtctccaggcccttgccatagcaacagggatgggcatttatgggccctgatggctcttactgagctcttcctgccacatcctgaggatgctagggctgcaactggggtggccctgtgcagtcacaaagcagggagtccggattggaggattcttacatgctggtgcccccagagcccctgcgtgtctgcgggggcctcccatgagagccaactcaattgtggaagacaaaccggaggggctgctgcccttctcagaacctgaaacctggaaccctatatgaatctgcatttctgatcagcccccattgtgggtctagggctaacggccatcagtgctttttctctgcttgaacaggtagaagcccccaaagttgtccattggccatgcccctgtgagggcatgagccagaagtgagggcagtttgtttttcagtgatacttcagagagggccatttgagatgggctctgaggtaagcataggagttcaccagacgcagaaggaggtcacaacctgggctgggttcagtaggtgggttccagattatccccaccccaacctgggctgggttcggcaagtggggtccaggctcctcactcccccttgctgctcttggttgacaggagagtaacaacatggtggtgcctgccatgcagctcgccagcaagatcccggacatgtcggtacagctgtggtcgtcagcactgctgagaggtgagtgcaatggccacccctcttccccagccccagcctggccctccccagagatcaaggctgctgggcatgtcctgctcagccttagctcggactaggcctccgtgggccgcagccccagttctagcatgggtagggggtgctcctcaggagaccctggttgagggcagtgggtgcatttgtggcatccgcttgactcggggtctggttcagtctctataggacacagaggctgcgacttggtatctggtagacttgggctgttagccgtggcgctctcagccttgcttcttcccggaaaggcagacagcagccatacctattgggtagggctggccagctagctctgggagcagggcgggcactcagcgggtatcattgctgttaccgcagctcccccatttccagattacgaaactaaggtccggagactcgcctggggccctggggaggtgacaggagacggggtgctccatgtgcagtgggctgcctggggctgctgcctcaggatgggcattgggcgtcctgccccaatgagcgcctgtttgcctgagggctggccatgggctccctggagggctggcgagaagcctggcattgggctttcactgcccagccagccctgttctgccctatgagggcggctggcgcatgggctttgtgatcccaagacagggctcaggtccagtgacgtgccaggcacccagagatccaccagtgcagctgggacttgaccttagggctccatctgcaccgagtgggagggcctgggcagtgacagggcaaggcgggcccccatgctcatgtcccactctcagacctgaataaagcctgtgggaacgccatggatgcccatgaagccgcccagatgcaccagaacttctcgcagcagctgctccaggaccacattgaggcctgcagcctccccgaacacaacctcatcacggtacgggtgtgggtgttaggggacgggatcaggactagcgggctccccacctgcaagaggaaggggcaccttggctgtatttctcttttgtccaacaaaccctaactcagcctcaggtgatcccttgatgggggagatggccatgggcacccccacccaagcaagggacccaggtgtctcctcggggcccattggactggggcatggagaacagagtcccggctgtgtgagcagcccaaggaaggcagcattccaacctcttcttccctgggaacggtccacagtgcctcactcgcatgtcctctcctccccacagtggacagacggtccaccccccgtgcagttccaagctcagaatggacccaacaccagcctggccagcctcctgtgaggccttgatggggccatccagctccgcagggcctgcgcgtctccggcttccacccagacggcactcaagcctgcccccgaggcgtgcttccttcctgattgtctctagagcttccaagtcctgggaatgtgcggggccagtccctgccctcccaggaggggtggtagccgttcccacctcgcagcaggacccccagtgcagaggctcacaggtggcacacaggcgctgtctctccagagccatccttcagagtggacctcagtgccagtcctgcctcagcatctgggtcacgtcggccaggagtagggtgcaggcctccagcaggtcctaatcctgtgtgccagggcaggcagtgccccaggggcaccacgcctgactctccatcacccaggccttgatgccgagcgggagtagagtgtttcctctgctcaaggcaatttccagagcccggatgccagtttctggcctgaatttggagggaagaagtaatggcgctagtgtgggacgaagcacagatcccagcacttttcccagctttctctccagcatcagtccctgcagcagctggggcctctggtcaggaaccctcagggacccaggaactcagcttccaaacatctgcaccttgaccggactcgccatcccgccgtgggggtgcaggtgattgtaaacacgggtgtgcatgtggatgcacacgggtgtgcggtgaagatctgtggagatggagctgggagctgaggctcctgttgcaccagccaccttcccccatcttgtggctgctgaggggcaggaagcgggggagtgggctcgtctcctaaatttaagatcacctcctcagctagcttagagtgcgtggcacgggccccccgcccccgagatctggagcccagggactttcttcctggcagatctgtggccttccctgctcagcctcttggtccccccactccctccaccgcctcaccttccctgctgggtctctggggcacagtgtgaaacccgcaccctagccaggccccagggagcctccgctgggcccagacagcagcgtttggttttatccacttttcttggataatcaggaggtgccccagtggtcacagtgtggcattccgagttggggcgggtggtcgggtcaagatagcagcagcaggtgtcagggctcaagacaccaccccctccagcttctggggcccaggagcctctccctgctacagggggtgggggtcctgctcagcagggtaggtggtggttttaggtcttgtcaccctcactcagtggaactgcctctgggagctttggcgtctgtgactaaagggacgctggattgctcaggtcagctgcttggggctcccaggctgggtgtgccttagccacaggcagggctgtcaataacccccttcctcactggccaccacctgacatcagcaccagtgacaggctggtcagagggcggggctggtgagggtttgtcctaagaggaccaccgccatctctgggtctccagggggagagcctggccctgtcctttgctacccagggctgcccccaggcccatgaagccaataggagagcgtgtggcactggcccacaaactgtccctgtcctgtcttcctcccgagccatggcctctgctagctccaccttgaaggagccccccacatcctcccctacatcccagagatgccaccacttgtgtctccacaatgtgctcctgcccacccgggttccgcactgtccgacccctgcacaccactcatgtcaccacggcgtgcatcatgttcatccccatctatttatttaagcctttctttgcttgtagggcattttgtatgtagagcagttgaaaacagaacctcagaacttaacatctgtcctgatgttaaagtgcttttcatgaccaccctgttatctatgtatatgtaaagttaaggatgagatcttaagtttacaattaaaaactcagtactcaatatttaatattctactcgagctttatggaagccaaatcatgtgcatgtgtgtgtgtgcgtgtgtgcaagctttgaacctccttccacagccgcatcttctcatgacacaaagcttttgataagtactttcctgtgggtcgctcagcgcctcatagcatctcattcaattgcaagaatagaggccagacacggtggcgcatgcctgtagtcccagctaactgggaggctgaggcaggaggatcacttgagcccaggagattgaggctgcagtgagcatgatcgcgacactgcactccagcctgggtgacggtgagactttgtctcaaaaaaaaaaaaaaaaacaatggaaggcagacagcaagtccctgaggacacatcacacagtgtcctgtagctaagtgtctaggaaaaaacaaaaactccaaacccttcagtggatgaggacaaggtcgcagaaaggcattctgttgacagatgaacagccgaaagctggccagaccctcctgtatgcctctgcccttgtcctgtgggttgagggggtctgaccaggaggccacctacagcaggaagtgaggctgccatgtttccttgagacacagctgcctctccccagctctgtccctgtagtcacctgccggtgggcgaggatcctctccctgggataagcactcccagccccgtttatcagaaacacaggcaaggaaattggaactgccacccagcccagcatggtggctcaattggttggttgcgttgtcagttgtctcttcgttttgttaaggtttttaataagtacgtttggcataatgtcttttaatgggtttgtaatatttgtaacggttttagcagcctataacttttcagctggtgcttttacttagggaaaaaaacaatttgtaaatacagaacattgtttaaaagacataaccatagaacatagcttcctgtttgtggattttgtttcctatatattcaaagtaaaatgacttacaggagccacgtgctgtgtctttgttgtttcctctgtccgctttgtgagccatcccaaagacggctgccacccttgctgccatgcccacaggggccccctctgtggcggggtcttcagcatgaggatgcagtccccaaatcctgagccagatgacgtgaatggaagcctgagtccccatctcctccactgatcattttcctctggtctggcctcgcctagagaggaaggaaccccatgctccatcagcatatgaggccttcagcagcctgctcctggaatcctcccttcccagccctctcaggggcagactccctcatgcacccaggtgtcctggtccctgtgtttttttttgttgttgttgttgtttgagatggagtcttgcactgtcgcccaggctggagtgcagaggcgcgatctctgctcactgcaacctccacctcccaggttcaagcgatactcctgcctcagcctcccaagtagctgggattacaggtgcccgccaccaagcccagctaattttttgtatttttagtaggaacagcatttcactgtgttggccaggctggtcttgaactcctgacctcgtgatccacctgccttggcatcccaaagtgctgggattacaggcctgagccaccgcgcccagccggtccctgcattcttagaggggaccagcctccatacacctgggagtgaggggagttatttgcccagatttttttgtttggaggtgaaattaccataacaaatttaactttttttgcaggttgtgctggcttacgcctgtaatcccagtactttgggaggccgaggcaggaggatcccttgagcccaggagttcaagaacagcctgggctacatagtgagacctagtctctacaaaaaatgtataaaaattagccaggcaaccaggtgccgtggctcaagccagtaatcccagcactttgggaagccgaggtgggcggatcacttaaggccaagagttgagaccagcctggccaccatagtgaaaccctgtctctactaaaaatacaaaaattagccgggtgtggtggcgtgcacttgtagtcccagctactcaggaggctgaggcaggagattcacttgcaccagggagtggagggtttcagtgacccaagatcctgatactgtgctccagcctgggtgacagagtaagactctctctctcaaaaaataaataaatacaaatacaaaatataaaaattagccggtatggtggcgcacaactgtaatcccagctactcgggaggctgaagcaggagaatcgcttgaacccggaggcagagtttgcaatgaaccaagatcacaccactgcctgggcgagagagggagactctacctcgaaaaaaaaaaatagccaggcatggtggtgtgttcctgtagtcccagttacttaggaggctgaggcgggaggattacttgaacccaggaggatattagcagagacagagtcttgctctattttatatgtatataaaatagtattatctgtaaagtggactgctcagtggtattcagtacgttcacagtgttgcacagttatcatctctatctagttctgggacattttcattcccccaaaaggagattcattgccatcagcagtcactcctcattcctcctccctccccaagcccctggcaactagtaatctgcttcctgtctgtgaatttgcctgttctggatattttatatcaatggaatctcataccctgtgacctcttgtagcctgggatctctcagcactatgttttcaaggttcatctgcactgtagcatggatcattgctttgttccttttatgagtgaataatatcccattatatggatggaccaaactgttgatcttttttttttttttttgagacagggtcttgctctgtcacccaggctggagtgcagtgggttgatctcggctcactgcaacctttgcttcctagggtcaagcaattctcctgcctcagtctcctgagtagctgggactacaggcgcataccaccaagcccagataatttttggatttttagtagagatgaggtttcaccatattagccaggctggtctcagacccctgaccttgtgatccacctgcctcggcctctcaaagcgctgggattacaagcataagccactgcacccggcttttttttttttttcttgagacaggatcttgctctatagcccagtgcagtggtatgatctcagctcactgcaacctccacctcccaggctcaagggatcctcccacctcagccccccaaatagctggaatgacaggcaccaccatgccaggctaatttttctatattttctagacatggggtttcaccttgttgcccaggctggtcttgaactcctggactcaagtgatctgcccgccttggcctcccaaagtgctgggattaccaccgtgaaccacggtgcccggccttatccatccttttatggacattcgggttgcttcccccttgtggcgactgtgaatagtgctgctctgtgagttttggctggaccacgtgttttcaattctcctgggctttccctgtgtctttattgtggacagacagggccgctcagcacacacatatggtgtgaaggccctcatgtcactctcaggttagttccccatgagagatacacaagccatcttagcctcgagccccaaggggctctgctggatgtgcaacgtttttgtattttgttttgctatgtgtcgtttagagacagagtctcactctgttgcccgggcaggagtgcagtggtgcaatcacttgagcctcactgcagcctcaaacgccctggcccaagcgaccctcctgcctcatcctcctgtgtagctgggactatagatacgtgccaccacacccggttaattttttttttttttttgagatggagtcttgcactgttgcccgggctggagtgcagtggtgtgatctcggctcactgcaacctctgcctcccagattcaagagattctcctgcctcagcctcccgagtagctgggattacaggcacctgcctccattcccagctaatttttttgtattttttagtagacacagggtttcaccatgttggccaggctggtctccaactcctgagctcaagcaatcctcccaccttggactcccaaagtgctgggattacagtcgtgagacaccacaccggccctgtgcgagtgtttgagtctcaacatggtgatcacagcaccccaaccatcgatgcctgggctccttctgccccatccccaccagttcagcaccaggcagccttttcactcaaggtagactctgcttatccttcatcatcagcttggacatcatcttctccagacagacaggcaggggcccatctggcccatctcatacctctccagcccctgcatgggattcacatcttgaacctgagctggaccagagcacagcatgacgagcctgccatgggaccagccacctttccagcaggtgtgcagcccccagctgggaggtgtgaacctgcatgtggacagcaggtctatcctgggttgaccaatgtttcacacaaagcctacacccaggcagtcaccttggcctgggcgcccggcagactagggtcacacagctcctcctgttgagtcatttccgagtaggctatgccctgtgcagcatccatgggaccctgactcaggaagtgagtgaccttccttttcccacaagccatgtcctcatccatgtcatccctcatccacttagaggatgaggcgggagggaggttgaggcaggaggatcgcttgagcccaggaggttgaggctgcagcaagctatgatcgccccactgcactccagcctgggtgacagagtgagacccgctctctaaacaaaacatagtgaaacaaaaaacaaatgatagaagccagatgtggtggagcatacctgtagtcccagctccttaggaggctgagatgggatgatggttcaggtccaaaagtttgagactagcctgggcaacgtagcaagaccccgtctctataaaaaataaaacatctgcctgtaatcccagtactttgggaggccgaggcaggcgtatcacttgaggccaggagtttgagaccaacctgggcaacgtagcaagactttgtctctataaaaaatttaaaatcagctggacgtggtggctcatgtctgtaatcccaccatgttgggaggccgaggcaggtggatcacctgaggtcgcgagttcaagaccaatgtggccaacatagcgaaacacagtctctactaaaaatacaaaaatcagctgggtgtggtgctgcacgcctctaatcccagctacttggaggctgaggcagaagacagtgaccccaggaggcagaggtggcagtgagccaagatggcaccattgtactccagcctgggtgatggagtgagactccatctcaaaaaaaaaaaaaaattaaaatcagccaggcatggtgcctcacgcctgtaatcccagcactttgggaggccaaggcagggagatcatttgaggtcagcagttttttttgttttgttttgttttgtttttgttttgttttgttttgtttttgagatggagtctcgctctgtcgcccaggctggagtgcagtggcgcgatctcagctcactgcaagctctgcctcctgggttcacgccattctcctgcctcagcctccttagtagctgggactacaggcgcccgccaccgcgcccagctaattgtttgtatttttagtagagatggggtttcaccgtggtctccatctcctgacctcgtgatccgcccgcctcggcctcccaaagtgctgggattacaggcatgagccactgcgcccggccgaggtcaggagtttgagaccagcctgaccaacatagtgaaaccctgtctctactaaaatataaaaattagccagccgtggtagcgggtgcctgtaatctcagctactcgggaggctggggcaggagaatcgcttgaacccaggaggcagaagttgcagtgagccaagatcacgccactgcagtccagcctgggcaacagggcaagactccctctcaaaaataaataaacctggcagggcgaggtggctcacacctgtaatcccagcactttggggggccaaggcagatggatcacctaagctcaggagtttgagaccagcctggccaacatggtgaaatcccatctctactaaaaatacaaaaaaattagccgggcatggtggtgggcacctgtaaatcctagctactcaggagactgaggcatgagaatcgcttgaatccgggaggttggaggttgtggtgagctgagatcaggccactgccctccagcctggaccacagagtgagattccatctaaaaaaaagtaataataaaataaataaaaataaaaataaaataatgcaaaaattagccagccacggtggtgcacacctgtaatcccagatacgtgggaggctgaggcaggagaatcacttgaatccaggaggtggaggttgcagtaagccaagatcacgccactgcagtccagcctggttgacagagctagactccctctcgaaaaaacaaaaaaaacacttttttttttaaatttaaaattgccaggcggccgggcatggtggctcatgcctataatcccagcactttgggaggccgaggcaggtggatcacctgaggtcaggagttcgagaccagcctggccaacatggtgaaaccccgtctctactaaaaatacaaaaattagcagggcttggtggtgggtgcctgtaatcccagctactcaggaggcttgggcaggataatcacttgaatctgggtggcagagctgagatcgcgccgctgcactccagcctgggtgacagagcgagactccgtctcaaaaaacaaaaaaaaaaattgctaggcatagtggtgtgtgcctatagtcccagctactcaggagtctgaggtggaaggattgcttcagcctgggaggtcgaggctgcagtgagccacgattgcagctctgcaatccagtctgagcaacagagtgagaaccggtctctaaaaataataataaaaataaaaaagaaaatggacaactttcttttgaacacagcttctagaacccagcacctgaggaaatatacgcaggcagaaatcctcgcagtggccacctcacatcctgtctcctcctattccggctgctttgacaaattaccatagactgaggggcttacaaacaacaaatacttatttcttactgatctagaggctgggaaattcaaaatcaaggtgccagcagattcggagtctggcgagggcctgcttcctggtttgcttcccgctctctagctccaccctcatgacataatcatctcccagaggccccacctccaaaatacaatcacaggctgggtgcagtggctcacgactgtaatcccaaaactttgggaggccaagacaggagaatcacttgagctcaggagttcaagagcagcctgggcaacatggtgacaccctgtctgtacaaaaaatacaaaaaaattagccgggcatggtggtgcgcacccatagtcccatctactggggaagctgaggcagaggatcacttgagcccaggagttcaaggctggagtgagccatgatcccaccacggcattccagcctgagcgacagatcaagaccctgtctgaaaaataaataaaaaacagaggaccgagcgcaatggctcacgcctgtaatcccagcactttgggaggccaaggtgggcagatcatgacgtcaggagatggagaccatcctggctaacacggtgaaactccgtctctactaaaaatacaaaaaattagccggccctcgtggcggcagagcttgcagtgagccgagatcatgccactgcactccagcctgggtgacagagtgagactcagttaaaaaaaaaaaaaagaaaaaacaggccaggcgcggtggctcacacctgagctgagatcgtgctgttgcactccagcctgggtgacaacagcgagactccgtctcaaaaaaaaaaaaaaatacaatcacatttcaacataagaatattgaaagaggagggacacggtggctcatgcctgaatcccagcactttgggaagccaaggcgggaagactacttgaggtcaggagttcaagaccagcctagccaacatggtaaaactccatctctactaaaaatacaaaaattagccaggtgtggtgacaggagcctgtaatcccagcactttgggatgcctaggtgggcgaatcacctgaggtcaggagttccagatcagcctggtgaacatggtgaaacctcatctctactaaaaatacaaaaattagctgggtgtagtggcaggtgcttgtattcccagctactcgggaggctgaggcaggagaattgcttgaacctgggaagcggaggttgcagtgagccgagatctcaccattgcactccaacctgggtgacaagagggaaactccacctcaaaataaataaataaataaataaataagatgaagtttcttatttcgtcccaaatttatgctcacatggtgagattacaatgaaattggctgggaaaggaaaggaaaaggttaatttccacatgaattttattttcttagtactctgatttttttgattttttttatttttattttttttttttgagatggagtttcgctggttgcccaggctggaatgcaatggtgcaatctcagcttacagcaacctctgcttcccaggttcaagcgattctcctgcctcagcttcctgagtagctgggattacaggcgcacaccaccacgcccagctaattattttgtacttttagtggagatgtggtttcaccatgttggccaggctggtctggaactcctgacctcaggtgatccacccgcctcggcttcccaaagtgctgggattacaggtgtgagtcactatgcccggccagggatagtccactttgtcagtgtgtgtttgttgtgaacgtcgtctctaaccacagttccttacactcagtgtttctgcagcgcagggttcaggctccatctgcagttaggcacactctgtccagagtgagtctctgtgtggccttggcgctgtcctgctattccagggttctgagcacaaatcctcccctaaagggttaagcacaaactgttcagaagtcctgtcgtgaaccggaagtgtatctcccactctgtcttcatctgcaagtgtcctcagttgctactggcggcccctggcctgctctggccttggccaccagggggcatggtggcccaggagcagcaagggctgcccaggcaatgtccccaccaggtaggacaggtgggaacctacaatccagctagaaagactgggctggatgttgccagaccccagtctggccaggctttgctcatctgcagggatgtggggtgaccttcacaccactcctgtaactgttggagaagacaatggccagggttctccgggcgtcagggtgacaccattccctcctttacttgccaaacatgtattaagcacctactgtgcgctggatgctgggaacacagcagagaccacatcagacaatgtctgatgccctcagagggtggacatagttcccctgatgacgggtttcagaagggagggagtgttgaccatctgtgagaagggagtgtcgcacagtaggtgggggacaaccacaggggaggaggtgggggacgctgtgacaagaccaaaaggagggctgggagcgatggttcatgcctataattccagcactttgggaggccgaggtgggcagatcacctgatgtcaggagtttgagaccagcctgcccaacatggtgaaaccctgtctctacttaaaatacaaaaaattagccaggcatggtcgtgggcgcctgtaatcccagctactcaggaggctgaggcaggagaattgcttgaacctgggaggtggaagttgcagtgagccaaggtcacgccattgcacacagcctgggcaacaagagcaaaactccgtctcaaaaaaaaaaaaaaggaggcaagcaggccccccttgggccagctgatcagagctggacaacattccagcttcggcgatggggccaccaagacccaggcatctggggaattgtgtcccctactggcacagttgagtgactcgggtggggactgcaggctctggtcctggtcccctcctgtctggccacccctcaggggacactgggagggtatcgcggctaccaggctgcctgtcgcatttatggagggccagtccaccaccaccttgtactcagctgacatctggaagcacatccaggaggacactgaaggctcagaaagtgcctgggcccctgtgttcaggtgtgaaatcaaatctctgaggccccagaccagagccatcatccttctgcccccactggactgagactcacatgcccagaactgcacttgtggatgatggtggtacatccagggcagaatacacggcagacaggtcagctgatgacagtgtctgctggccagggtcagtccctgactctcttgtataatgtgtaacccaacagcgcgtgcccagggggctggggcactccagacaccggcccaggccctggcttgactcaggcctgaccctaaaggaacccgagtaagtgtctcagagccgggtcctggatccaaatgcccctaatacttcacacaccggccaccatgctgcttcctgagcaacctgctccccaggaaaagtgacctaatcactccaggctgttcttctccggagcatcctctggtacccaccgaaggaagtgacccctgagtcctactcagctcctccactcacgggatttttttttcttggcaactagttctccctatacccaaaacctatatgacaagaggatcctttttattaaaaaaatttttttgccaagtgcggcaaaaaatcccagcacaggccgggcacggtggctcacgcctataatcccagcactttaggaggccgaggcgggtggatcacgagctcagaaggtcgagaccatcctggctaacacggtgacaccccatctctactaaaaatacaaaaaattagccgggcgtggtggtgggcacctgtggtcccagctactcaggaggctgaggcaggagaatggtgtgaacccgggaggcggagcttgcagtgaggcaaggtcacgccactgcactccagcctgggcgacagagcgagactctgtctcagaaaaaaaaaaaaaaaatcccagcacttcgggagtctgtaatcccagcactttgggaggccaagagtttgagaccagcatagccaacatggtgaaaccccgtctctactaaaaatacaaaaattgggcacggtggctcacacctataatcccagcaattttcgaggccaaggcgggtggatcacctgaggtcaggagttccagaccagcctggacaacatggtgaaaccccatctctacaaaaaatacaaaaattagccgggcattggtggtttgtgcctgtagttccagctacttgggagactaaggctggagaatcacttaaacctgggaggtggaagttgcagcaagccaagattgcaccactgcactacagcctgggcgaagagtgagaatctgtctcaaaaaaaaaatttttttctctttggtcatgtgcggtagctcacgcctgtaatcccagcactttgggaggccaaggcaggtggatcacttgaggtcaggagttccagaccagcctggccaacatggtgaaactcccgtctctactaaaaatacaaaaatcagctggatgtggtggtgggcacctgtaatcccagctacttgggagactgaggcatgaaaatagtttgaacctgggaggcagagattgcagtgagctaggatcatgccactgcactccagcctgggagacagaaagaaattctgtcttaaaaaaaaaaaaaggggggggtggcaggcgcagtggcttacgcctgtaatcccagcactttgggaggctgagacaggcggatcacatgaggtcaggagttcgagaccagcctggccaacatggtgaaaaccctgtctctactaaaaacacaaaaaattagccaggcgtagtggtgggtgcctataattccagctactcaggaggttgacgcaggagaattgcttgaacccgggaggtggaggttgcggtgagccgagatcgcaccattgcactccagcctgggcaacaagagcaaaactctgtctcaaaaaaaaaaattttttttttttggccagcgtcaatggctcatacctgtaatcccatcactttgggaggccgaggcaggaggatcacttgagcccagaagtttcagaccagcctggcaacatgatgggaccctatctctacataaaatttaaaaattcaccaggtgcaattaggcctggtccccctcctctctggccactccaatctaaagtcaaattgaaaaaaaatgttggggctgggtacggtggctcacgtctataatcccagcactgtaggaggccgaggcgggtggatcacttgaggttaggagtttgagaccagcctggccaacatggcgaaatcccatctctactaaaaatgcaaaaattagccaggtgtggtggcgggtgcctgtagtaccaggtgctcaggaggctgaggcacgagaatctcttgaacctggaaggtggagattgcagtgagccaagattgtgccactgcactccagcctgggcaacagggcgagactctgtctcaaaataaataaataaatagataaataaataaataaaaataaaataatttttgtgtgtggagacagggtcttactctatttctcaggatgaagtgcagtggcatgatgtagccaggaactggagcttcaaactcccaggcccaagcaatcctccctcctcaacctcccaagtagcttggaccataggcaggtgccatcactcccagctaattttttaattaatttatttatttttgttgttgttgttgtttgtttgttttgagacggagtctcactgtcgcccaggctggagtgcagcagcgcaatctcagctcactgcaacctccacctcccaggttcaagtgattctcctgcctcagcctcctgagtagctgggactataggccctcaccgccgagcccggctaattttttttgtatttttagtagagacggggtttcaccatgtgggccaggatggtctagatagaactcttgacctcgtgatctacccgcctcagcctcccaaagtgctgggattacaggtgtgagccaccacgcccagccttattttaattttttattgagacagggtctcactatgttacccacgctggtcctgaactcctggcttcaagcaatcctgcctcagcctccaaaagtgctgggattccagccctgagccactgttcctcgctgaaggggattctttttcagggcattctttgtgacacactccttccctgggtgtgtcctggaatgtccgctggccacacccaggcctggtctggctgtggggacacccacatgcattgtcagccgggtacgagaccggggtgggctttgcacacagatcccacgactgtatacactcagccccgtgacaggaactgtagcccatggccacagcatctcttgctagaaactttttcaagaaacttacctcagtactcaaagccactgcggtcagcaagtgctgaacatgccccaatccctaacctcagaaaaggacactttctcttaactcctgtgtaaagggtcaggactggtgtctggctgccgaagaaactaaacatccagcttcgctttcccaggtaacatttgctgtatcatctgtgatgcaggagatggcaatggtattattattattattattattattatttttggaaatggagtctcgcgctgttatactgttgcccaggctggagtacacaggtgcgatctcggctcactgcaacctccgcctcccacgctcatgtgattctcctgcctcagcctcccaagtagctgggactacaggcacccagcaccacacctggctaatttttgtatttttggtagagacagggtttcaccatgttggccaggctggactcaaactcctgacttcaagtgatcctcctgccctggcctcccaaaacgctgggattataggcgtgagccactatgcctgtccggcaatggcattttgaccaatacaacatgggcatctaactagaattggggacacccacacgggtcataatttggggccaaagtagagttttttttgtttttgttttttttttggtagcgatgaggtctcactatgttgcccaggcagttctcaaactcctgggctcaagcgatcctcccacctcagcctctcaaaaggctgggattacaggcataagccaccgtgcccagcaacatttttaactctttttttttagagaaagggttttgctctgtcacccaggctggagtgcagtggcacaattgtagcctactgcagcctcggcttcctgggctcaagggatcctccagtctcagcctccagagtagttaggactgcaaatgcacaccaccacacttagacagtttttaattaattaattaattaattttgagacagagtctcactctgtcacccaggctggagtgtagtggtgtgatctctgctcattgcaactccccatcccagattcaagtgattctcctgcctcagcctccagagtatctgggattgcagacacatgccaccacgcctggctaatttttgtattaatatttttagtagaaatggagttttgccatgttggtcaggttggtcttaaactcctgtcctcaaatgatccatctaccttagcctcccaaagtgctgggattacaggggtaagccaccatgtccagccaatttttaaattattttttgtacagatggagtcttgctttgttgcccaggctggtctcaaactcctggcctcaagcgatcctcctgcctcagcctcccaaattgttggggggttacaggcatgagctactgtgcctgacctggaagtggattttgaagtggattttgcagcctgtttgtgtctcccaagccacaaaagactctgaccttcgtgtttgaccagttccttggaaggcaccagtctgtgtattaagtggattatccaaacccagactgactcctggcacatggaagatgctttgggatacacttatactaaaagggtattcattcgtgactgatctgaaatccaaatctaatggggcatcctatattttcacttgctaaatgtggccaccctagatgctcaatgacatccttgaataaaggaagctgatgaagttcaaacaaataattttaccagcggggtaaaaaaagctcaaagctcagtgcactttgcgaaacagtcatttcctcttccggtcagaataaactcctgactcctcccaggcccaagtgatcagccactccctcctaccagctggctgggctgctgtgctcagtcccaactcaggaaggacaagagtagctcctgtgaccataatgcctgtccacaagctgaggccccaccccactccgcctccttttctttttctttgaaatggagtcttggtctttttgcccaggctagagtgcagtggcgtgatctcggctcactgcaacctccacctcccaggctcaagcgattctcctgcctcagcctcccaaacagctgggattacaggcatgcaccaccacccccagctaatttttgtatttttagtagagacagggttttcaccatgttggtgaggctggtctcaaactcctgacctcatgatccacctgcctcggcctcccaaagtgctgggattacaggcgtgagccaccgtgcctggccacccccttgctttttagacacaaggtcttgctctgtcacccaggctggagtgcagtggcataatcttggctcactgcagccttaaaactcctcaagtgatcttctgtctcagcctcccaagtagttaggactatgggtgcgtgccaccaacgcgcctggcactgagacctggatttttttttttttttttttggtgagatagagtcttgctccgtcgcccaggctggagtgcagtggggtgatcttggctcactgcaacctccgccttccaggttcaagcgattctcctgcttcagcctcccaagtagctgggactacaggcgcccgccaccatgcccagctaatttgtgtatttttagtagagacagggtttcgctatgttggccaggccggtcttgaactcctgacctcgtaatctgcctgcctcggcctcccaaagtgctgggattacaggcgtgagccaccactcccggcctgagacctggatcttaaaaagggctcagctgggtgtagtcacacacctgtagttccagtgacttgggaggctgatataggaggctagcttgaagcccaggagttcaaagtgagactagcaacataatgagacctcatctcttttttttttttttttttttttttttgagacggagtcttactctgtcgcccaggctggagtgcagtagtgccatcttggctcactgcaagctccgcctcctgggttcatgcctttctcctgcctcagcctcccaagtagctgggactacaggcgccctccaccacgcccggctaattttttgtatttttagtagagacagggtttcaccatgttagccaggatggtctcaatctcctgatctcgtgatctgcccacctcgacctcccaaagtgctgggattacaggcgtgagccaccgtgcctggccgagacctcatctctttaaaaaataataataataaagttggctgagtgtggtggctcacgcttgtaatcccaacattttgggaagccgaggtgagaggattgcttgggcccaggagttcaagggcagcctggcgaacataataagactcccatctctacaaaaaaacttaaaaattagctaggcgtggtggcctgcacctgcagtcccaggtattcgggaggctgaggtgggaggatcgcttgagctggggaggttgaggctgcagtgagctgtgatcatgccactgcactccagcctcagcaacagagcaagaccctgtctctaaaatcagaaagaaaggaagaaaaggcaaaaagaggggaaaagaagccaagagaaaggcttgaaatgcatgtggatgaaagccctgacctgtattttaggctcagttacactcagatgtaactgtgtgtctgggatgcaaaagagctcagatcctacagaatctcaaggtgaattcttttccctgagtagcataaggcatctttttcccatctaacactgggttgggctcctcccttctgtatgcaaagtggccacaagtgcccaaaatgaactccctccagttcagaaatgcattccttcctggttagggaagtcactgttttgacttagaagtcttctatacttcaggcgtctagtgtctacctaataccttttgcctcagaaaagggtctaatcccacttaattacaagaagatttgctgttaggtttttgacctagagatctaaaaaggcctggctgaaagagttcctgagctccatctggacttaattccagattttctagccaaccaacactaataaagctatactctgctccccacctctgtataattcaggtgctacctgactttctctggtgaagcagcaggagtatttaggccaacctgttggtttggctgtgtctgtttctctctggaaatagacaatgactttttcttttttttttcttgtttttgagacagagtctcactctatcgcccaggctggagtgtaatggcacactcttggctcactgcaacctctgcctcccaggttcaagtgattctcctgcctcagcctcctgagtagctgggattacaggcgcctgccaccgctcctggctaatttttgttttatttatttatttatttatttatttatttatttatttactgagacggagtctcgctgtctcccaggctggatgcagtggctcaatcttggctcactgcaagttccaccttgccaggttcacgccattctcctgcctcagcctcccaagtagctgggactacaggcgcccgtaatttttgtatttttagtagagacagggtttcgccatgttggcaggctggtctagaaatcctgacctcaggtgatgcgcctgcttcggcctcccaaagtggagggattacaggcgtgagccactgctcccagagagtatctcattcttaacagttctttaactgttatcaaaatattggtctcaaagtactttaaggcaccgaaatgaggcacacataaacatatcatcaacacgctgaaatgtcatgaaaaaaattatactgagagacgtatataaaataagattttttttcttttctttttttttttttgagacagagtcttgctctgtagcccaggctggagtgcagtggcgcaatctcagctcactgcaagctccgcctctccggttcgcaccattctcctgcctcagcctctggagtagctgggactacaggcccccgccaccacgctctgctaactctttttttgtatttttagtagagatggggtttcaccgtgttagtcaggatggtctcgatctcctgacctcatgatccgcccgcctcagcctcccacagtgctgggattacaggcgtgagccaccgctcccgacccaagattatttttttaaactgaaaaaatgtatagtaattagccaataaaccagaatctgtaacattagatatatatatatatatatatatatatatatatatatttttttttttttttttttttttttttttcctgaggcggagttttgctctgttgccaggctgcagtgcagtggtgcgatctcggctcacggcaacctctgcctcctggtttcaagtgattctcctgcctcagcctcccaagtagctgggactacaggcacgcgccaagaccagctacttttttttttttttgagacgaagttttgcgttttgctcttgttgcccaggctaggagtgcaatggcgtgatctccgctcattgcaacctctgcctcccgggttcaagcgattctcctgcctcagcctcccgtgtagctgggattataggcaagtgccaccatgcccggctaattttatatatatttttttaatagagacagggtttctccatgttggtcaggctgatcttgaactcccgacctcaggtgataggcccacctcagcctcccaaagtgctgggattacaagcatgagccaccgtgcccggccaatttttgtatttttagtagagacagttttcactatgttggccaggatggtctcaatctcttgacctaatgatctgccggcctcagcctctcaaagtgctggggttacaggcgtaagccaccgcatcctgcctagacactgactttttcaacacattttccctggaagaaccaagaccaattctgatgggcttcccaaaggatgcaggttgtaatggattaacagttaacatatgtgaacctgaaagtgcttggcaaatccaaataaatatgttttcttttttggggtatggggggacagggtctcactctggccaggctggagtgtagtggcactatcatagctcactgcagcctcaaattcctggactcacgtgatctccctgcctcagcctcctgaatagctgagactacagacatgcaccaccacgcccagctaaattttttattttttgtggagacaaagtctcaccatgttgcccaggctggtctcgaactcccaggctcaagcaattttaaagtgctaggattacaggtgtgagtagctgcacccagccccaaatgaattatgcagtccaataatcttagggggtaatgatggagggcaccttgctttgtgcacctgaaccgccactgtcattgacaccagagtgctttagctcttctgcttattacccttcccactggtattaattagccatcattcctcattgccagtgggcactgcttcctttgtccaagggtacagcatcaacaggaggtctcacaggctagcaccagggaaccctcacttttctagctaccactgaggctccgcctcccttgtctcttgtggagtggcctggctccgttcccatttccctatttggatgtgaatgtcacttagccagtttgcccacatgatttcccagagccaggaagggaaacgccttggtgcagagatgcaatcacggctaccaccaaggaaaagaaggcacatccttggcgattctgtcacgtggtatctctttcttctttctttcttttttttttttgttgttgttgttcttgtaggttgtttggtctgtttggtttgtttttgagaaggagttttgctcttgtcgcccaggctggagtgcaatggtgcgatctcggctcactgcaacctccttctcccgggttctagtgattctcctgcctcaatctcctgagtagctgggattacaggtgcctgccaccacgcccagctaattttttgtttgttttgagacggagtctgggtctgtcgcccaagctggagtgcagtggcgccatctcggctcactgcaagctccgcctcctgggttcaccccattctcctgcctcagcctcctgagtagctgggactacaggcgcccgacaccacgcccggctaattttttgtagttttagtaaagacggggtttcactatgttagccaggatggtctcgatctcctgaccttgtgatccgcccgcctcggcctcccaaagtgctaggattataggcatgagccaccgcgcccggcagatgcctggctaatttttgtatttttagtggagatggggtttcatcatgttggccaggctggtcttgagctcctgacctcaggtgatccatctgcctcggcctctcaaagtgctgggattacaggcatgaggccctgcacccggccacttacagctgaatcctaaacttgtattgtctgaatctaaaattgggcccatgtgcaggaatggtgacatgaagggaggcgaggtctaagccctgttgagtccttgtgcaaagcggaaccatattaagaacctaaaacttaatatgttaatatgagtgcagtggctcacgcctgtaatcccagcactttggaaggccaaggcaggcggatcacgaggtcacgagttcaagactagcttggccaacattgggaaaccccgtctctactaaaaatacaaaaattaggttcatgcctgtaatcccagctactaaggaggctgaggcaagagaatcgttttaacctgggaagcagaggctgcagtgagccgagagcacatgattgcactccagcctgggtgatagtgagagactgcgactcaaaaaaacaaaaaggtcgggcgtggtggctcacacctgtaatcccagcactttgggaggctgaggcaggcagatcatgaggtcaggagttcaagaccagcctggccaacatgatgaaacctcatctctactaaaagtacaaaaaattatctgggtgtggtggcgagtgtctgtaatcacagctactcgggaggctgaggcagaagaatcgcttgaacctgggaggcagaggttgcagtgagctgagattgcgacattgtactccagcctgggcaacaagagcgaaactccgtctcaaaaaaaaaaataataataataattagccgggtgtggtggcatgtgcctgtagtcccagctgcttgagaggctgaggcacgagaatcgcctgaacctgggagacagagaatgcagtgagctgagacatgacactgcactccagcctgggcaacagaatgatattctgtttccaaaaaaaaaaaaaaaaaaacaaatcagaacatcagtctctaaggattgcactgagaattgtgagctcaaagtgtccacagtgcctggtacacagtagaacacagaaaatttcagtttcattccagtctctgggattctttctgagagcaggaatttaaccttattcatttaagtaatccctcagtgctctgcacatgactttactttatagttgttgaattgaaccaggatcaaagagcagctcattgtccagcctcttcacttcatacatgagaaactgagcagcacagagggcaactgtaactcatccacatcccacttgtttgtttttttgtttgtttgtttgtttgtttttgatacggagtctctctctgttgcccaggctggagtgcaggggtgcgatcttggctcactgcaacctctgcctcccaggttcaagcgattctcctgcctcagcctccggagtagctgggactacaggcatgtgccaggacgcctggctaattttttgtatttttagtagagatggggtttcaccatgttaaccaggacggtctcaatctcctaacctcatgatccgcctgcctcgggctcccaaagttctgagattacaggcgtgagccaccacatccggccatcccacttgtattttatggctggatctttttttttcctgagatggagtttcactcttgttgcccacgctggagtgcaatggcgcgatctcggctcactaaaacctccagggtagctgggattcccagcttcccgagtaggtgggattacaggcacatgccaccacgtttggctaattttgtatttttagcagagacagggtttctccatgttagtcaacctggtcttgaattcccaacctcaggtgatccgcccgcctcggcttcctaaagtgttggaattacaggcatgagccaccatgcccagcctttcttttttttcctgagacatagtcttgctctgtcgcccagagctgaagtgcaatgatacgatattggctcactgcaacctccacctcccgggttcaagcaattctcctgcctcagcctcctgagtagctgggattttaggtacctgcaccatccccgtctaatttttgtatttttagtagagacggggtttcaccttgttggtcaggctggtctcaaactcctgacctcaggtgatctacccacctcggcctcccaaagtgtcaggattaccggtatgagccaccgtgcctggccactaattttattttatttttttgtagagagggggtcccggtatgttgcccaggtgagtctcaaattcctgggctcaattctcccaccctggcctcccaaagtggtacaattgcaggtatgagccctgatttcttatatggtaaagacagtaactggcctctctagggactggcaggtgtgggttcgaccccagctctgccaaccaccaaagtccaagtgtttattgtccacctggactgcctcagacacttgcaggatgtggtaagtactatgacacaggtgcacagaaggtgctctgggaacagcttgtcttcatgtttacaatggcttctttccctagccaaggactctatcagccttgccacttggggacaggttgagctcgctcagggagtcaggccccacagggctccctgccaacctcccatcattgtgattgaatttattctttatttttcttccaggaacatcagcgcacttgtaacaataataatcatcttttctactgggtatactgtttcatggtttacaaagcactttcacatccattatctcatttaatcacttcctcctctacattcctacaacagtttcttggtacctcttcagtataatattctgcctggtataacaagcctatttccctttactgcatttatttttactcacaagttccagcatataattcaggcatctttgcaccttggacacttctgtgtacaaagtaagcacaataaaagtttgacatgccagtcacagcagccttcgaccacagtaccagctacttgggaggttgaggcaggaggattgcttgagctcaggagtttgagtccagcctgggcaacatagcaagaccctgtctcttcgaaaaagtttgccggctgggcctgctggctcacgcctgcaatccgagcactttgggaggtcgaggtgggcggatcacttgaggtcagaagttcaagaccagcctggccaatatggtgaaaccccatctctactaaaaatacaaaaaaattagccgggcattgtggtgtgtgcctgtaatcccagctactcaggaggctgaggcaggagaattgcttgaacctgggaggcggaggttgcagtgagccgagatcgtgccactgcactccagcctgggcaacagagaaagactccatctcaaataaaaaaaaaaagaagtttgccatattgaatcatcagtgttgcaggtctttctcattcattactgccatcttcactcctttcattcaatgggattgcctactaaggacaaagctgggttctttggaggggaaatgaggcaagaagttcagaatcaagtgaagggggaagacacaagtgaaggccctgatccctggtaggccacagtacatgcttcatgctttagcagcggtgcaaacacagttggggctgggcacggtgactcacacctgtaattctagcgcattggaaggtaattcggccacactgggaggctgaggcgggagaattgcttgatgccaggagtttgagaccagcccaggcaacagaaggagaccttctgttttaaattttttttttttaatgtaaaaacttaggttgccaggcgcggcggctcacacctgtaatcctagcactttgggaagctgaggggggcagatcacgaggtcaggagtctgagaccagcctggccaacatggtggaaccccatctctactaaaaatacaaaaattacccaggcgtggtggcacgcgcctgtaatcccagctactcaggaggctgaagcaggagaatcgcttgaatctgggaggcggaggttgcagtgagccaagatcacccccctgcactccagcctgggcgacagagcaagactccatctcacaagacaaaacaaaacaaaacaaacaaaaaaacccctaggtcttgtggcatgcactagcggtaccagctactcaggggctgagtcaggaggatcacctaagcccaaggaatggaggttccatcatgatcttgccactgtactccagcctgggtgacagagcaaaatcctgtctcaaagaaccaacaaacaaaaagaaaaaaaaatactcttgcttcccagagtttggggtgactttttttttttaagacagggtctcactgtgtcacctaggctggagtgcagtggtgcgatcatggctcactgcagccttgacctcccaggctcaggtgattcttcaagagtttggggtgactgattttatctgggggtgactgtgaagcaggaatgcttcttggaaggatcttactcagcagagaaggaaactgcagggctgaagaggcaaacgggacacatttgggaagggccacaaatgtgtcccttgggaaaaagtggacagctgcatggaaaaattctcctcaaaaagaataggaggctgggcgcggtggctcacacctgtaattctagcactttgagaggccgaggcgggtggatcacttgaggtcaggagttcaagaccagcctggccaacatggtgaaaccctgtctctactaaaaatacaaaaattagcttggtgtggtggcgcatgcctgtaatccgagctgctctggaggctgaggcaggagaatggcttgaacctgggaggcggagatggcaagatagtgccactgcacaacagagtgagactgtgtcaaaaaaaaaaaaaaaaaaagggaaagggggcaaaatgggctgcttttctttcgttttcttttttttttgagagggagtctccctctgtcgcccaggctggagtgcagtggcgccatctccgctcactgcaagctccgcctcccgagttcacgccattctcctgcctcagcctcctgagtagcttggactacaggcgcccgccaccacacctggctaattttttgtatttttagtagagacggggtttcactgtgttagccaggatggtctcgatcttttggcctcgtgatccgcccgcctcagcctcccaaaatgctgggattacaggcgtgaaccaccgcgcccggcctgggttgcttttctaaaaaggtctaactcaccgcattgtcctagggctgaggcgtcagaaagtcgaagtttcaggaaaaggggaccccttcctcccacactcagatgctgcttagaaaagcacatggagcacaactccctcgcatttttctttttctttctttctttttgagacggagtctcactgtcatccaggctggagtgcagtggtggatctcggcgcactgcaacctgcctcccaggttcaagcggttctcctgcctcagcctcccgagtagctgggactataggcgcccactaccacgcccggctaatttttgtatttttagtaaagacagggtttcaccatcttggccagactggtctcgaactcctgacctcaggtgatccgcccacctcggcttcccaaagtgctgggatacaagcgtgagccaccgcgcccgataactttcttttttcttttttttgagacagggtctcgctctgtcgcccaggctggagtgcagtggcacgatcttggctcactgcagcctcgacctctcggttcaaacgatcctcccacctcagcctccggagtagctgggactacaggtgtgcgccaccacccctgctgattttttcattttgattttaatttttgtagagacaggattttgccatgttgcccaggctggtctgaaactcctgggctcaatcgaccctccagtctcaaccttccaaagtgctgggattccaggcgtgagccaccgcgcccggtcgcatttccttagtaaaggggtgaggggcgcccatctcctgccatccttctctggagagaggcgaggtgcttgaagtcccaaattcctcgtgtagtgagaaaacaggggaggcagaaaatccccaagatatcttcagaaacgaaggtggaggggggcgcgcagccctcactttcctcagataaaggagggacagggagagcggcccccaagagtgcttagaaaaggagtgtatgtgccccaaatattcctcggaaaaggcggtggaccctggattctccaaatgctccttagggatcccgaactcccatgttttcttaggaaacagagctggggtcccgaatctacaacataatcgtgatcccggcaattgtcctcagaaaaccgggcagggcaagaaacccccaaactctctcagaagaggggtcggggcaagatttccgaagatcctcctcagaacgggggccagggaaaagaatcccgaagcagagtcttctcagaaccggggcgcgcgccagaatctccaagattctcctggatagagagggtcgaagccacaagacgaggcagaaagagcgcgcggccaccggagccccttagaaacactgccaggccacgaagcgcccgggctcctcagaggcgccgctcgcagcccgtcgtagctgccccacgcccgcctggccaaggccgcctccggtgcattatgggtggggagcccctgcagagcactgcggggaaccccctgcccagccagttgccggccgccgggtggcccaggcgatccgccctccggggtcccagggagccggccacgaattgactcgtccccctaggccccgcccctcgcggggttcccgccccgaagtttaagtcccgcccccgcatggccttgagtggctctgcggcccgctcccatctaccattggcaggatgcctgtcagtcattccgtcccgcctcctcggacccgccccggccggcggcgcgatcccgagaaccagccggcccgcgcactcactggtcgtcatgcgctgtctgtcatgaagctggccacaccttccatggggtgcgggtcctgggagtcctggctggacctcattggcttgtggcgccttcactcggagagacgcgcctcaacccggaagtgtgcgaggcgaaatctgcctagcaaccggggaagccgggctgtgaagcgggcaatttcagtgtgagactgagccgcgagactgagctgcggctccgagcgctgcgcggcggctcctcccgcccagggtcagcgccccggcgcgcgcacgcgcacccccgccgcccgagcgcgccccgcgccgcccgcgcagtcggtcggtcggtcgtctgtcctgtcgccgctgccgccgccgccacagcggccgccgcgggcgccacctgagggagtcgcctccgcgggacgccacaagacctgaccggactgcgccgcccgaggccgtcggccgccgtcagcgagggcgccgagcaacttcggtgagtaaggggcaggcgccgctggcgggtccccggtttccggtgccccaggctctctggggcttccgcttctcccgcactaccttggccgagtttactcccttctccacagcacttccccctcaggggagcccctgctctgggcccccccgcctctccaggggacccccgcctctctaggagaccccgtctctcttagggaccctcgcctctcttggggacacacccgcctctctaggggcctccctcctctccaggagacccttgcctctctaggggaccccgtctctcttggggaccccgtctctccaggcaggggatcccatctttctagcgacccccacctttctaggggactttcttcccatctaggggacccttgcctctctaggggactcccatctctccaggcaggggaccccgcttctctaggggaacgctgcctctctagaggatccgtgcctttctagaggatccccacctctctaggggaccccgtctctctaggggacctcgtctctagggaacccccgtctctccgaggggagccctgtctctctaggcgaccctgcttctctgaggggacaacccctcttatcaggggctcccccgcctctctgaggacccctgccggagggaacccccacctctctgaggaatcctgcctttgacaggaactaactcccttctttggggatccccaactctttgagaattcccgcttatctgaggggactcccttcttcactgagggtccctctacttttctcaggaacccatccttttgagggacccctgcctccctagagaccccttcctatctgaggacccccgcctctgaggggagtccctttctctgagggacccctgcctctttgaggggaatccccatctctctgagagaccctctgcctctctgagggtcccccgctttctttgaggggccctggcctctctaagaccctatcctcactcctctaaggagagacccctgattctatcagggtgtactttctctgagggatcccccaccttttgtggacccctggggaaccccttcttccccgggggacccctcttttcagaagacattgctgcttctcggaggaagccttgcctctctgtggggatctccccacccccacctctctcagctgtggtcctacttttctgacttgtccccctttctttttttttttgagacagagtctcattccgtctcccaggctggagtgcagtggtgcgatctgggctcactgtaacctctgcctcctgggttcaagcgactcttctgcctcagcttcctgagtagctgggactacaggcacccaccaccatgcctggctaatttttgtatttttgtagagagggggtttcatcatgttggccaggctggtctcgaacttctgagctcaggtgatccacccgcctcggcctcccacagtgttgggattacaggtgtgagccaccgtgcctggcccccgctttttgatgagtgccttcactttcctgagggggtcccccacttctttgaaatgcccatctgactggatcgttagttttctgaggtatacccctactttaccagtatccttcttttctatttcttctgggcccccaaatgctctatggatcctgcagttttctgaggggtccccagtttctccagaggttttccccttaacttgagatatcccactcctgtaggctcctcacatctctgaagtgtgtctccccttttccaagatatcccgtctcccgatgggagacactgtggatcttcttcacttccctgaggggtccctctgaattccgtggggttgcctcccacttgccctctttctagaggctttcctcttgattttctaagggagaaactctttatttatccttggagcactcacatcaagcttctcctccttttttttttttttggagatggagtttcgctcttgttgcctaggctggagtgcaatggtgtgatctctggctcaccgcaacctccgcctcctgggttcaagcaattctcctgcctcagcctcctgagcagctgggattacaggcatgtgccaccacacctggctaattttgtatttttagtagagatggggtttctccatgtgggtcagggtggtctcgaactcccaacctcaggtgatccgccggcctcggcctcccaaagtgctgggattacaggcgtgaaccaccgcgcccggccaagcttctcctctttctgtctgtggcacccactttcccccaactgtggaggaagagagcagaaatgtacccctccttcagtctttgttgccactctaggggtattctctggacttttatttcggtttccaggagcctggaggattttgtggctggaggggaaagtcaaaaagcatgatttcctcatgtccctctaagacctgctagatttgggggagcaggagctgctactagatgaccaccttagttactccattttccagccgtgaggccatcacagtgttgtcaggcctttgtgaagacaaaagggacaagggagaaacattgtatccccattatcacactgtcaagctgtgggagtgacccacttcctgtcccatccctcagtcctccccctgcatagtataacttaaccttccctccccgtgctgaaaaaaaatcaaaataaaaaggaaaagaaaactctccttcatctcttcctgttgcattttctctcccgagaccccctgattcaatccttgatcaaataggatccctagttcgtaggccagtttggtttgaaagacagagcaagaagcaggaaatggatcaccttagatccagaaacaggggaagggaggcaagggacaggatttgacgacatttctgtaagttttaggtgactttggcctggcccaaaaggaactttttacgtggcgtttacaaatctcatatgtactttttttaatggcccaccctggattccaagttcactccagtagctaattttatctgctttgccaaatgcagagctctgtggagcccaagtagatgaatgctggcattgagagatggtccaaaggacaggaatgaactcagtttgaaacctgagtaacttgtaaccacttcgtgtccacgcacaagtctcaagctaaaaatgtggggagagtttgactgaagtagagttctgaagtataggctgcgctagtgtttggtttagcatttcaacaagttcttccctctgactccattggaactgcagttcactttacagtttgactgagggcagtctctctcctgttcatttccatctgggtcttgcttaatttgagtcctttgtgaagactcctgccgaggctataatttgagttctaaatctgtcggtggaccatgtggacacaagtttcaactcgagctattttcttctggggagaagtgcttggagactttcctgggccctctgctgctgggctaagtcaagtccaggcaggaggctgctgcagacttggttgctcttctcctgcctcttcctggtcagctgtaggcactgccctcaggggaagggaaagttggaggggagtttgggactgagatgagggtagagaagtgcctgaggtgagggtagagaagtgcctgcacgtatttactattttattttatttttttgagacagggtctcactttgtcactcaggcgggagtgcagtggtgcgatctcggctcactgcaacctctgccctactggctcacgtgatcctcccacctcagcctctgaagtagctgggaccacaggcgcatgccaccacgcccggctatatttttgtatttttggtagagacgaggtctcaccatgttgcccaggctagtctcaaactcctgagctcaagtgatctgcccgcctcagcctcccaaggtgttgggattacaggcgtgagccactgtgaccgacctattattttaaataaaacctataggaccagcagatgggatgttaaaaagggaatggacaactttgaagtcagaaggagccagttcagattctggtgctgcccttcttagttatgtggccttggacaagtgatggcacaaaattggcatgttattaaatattcgagggaacacattgctgtgaatgtgtgtgtcaagttgcttactgatgatgggaggtgcttactagatggatgaatgaatgaatccgagatgatgaactggaggtggacagcacagctcctggcacacagttggtgtgcagtaaaggctgcttgttgtattcctggcctggactcacagaccaggaagcgcttgatattctgccaaggctaaaaatgcccaaagagaaagaaacttggtatgtctcttggaaaacccactcccctactgcgtctcttagcaagagttttctgtgttctgataccagatgtgagatgggtttactgtatggcagggcatttgtgtttctcttggccttggtgtctccccctgtaaaatggggtaatttgtgaattaagggcaagtagggagatgtattactctaattagaccacaggcaagatagaagattataatggacttgaagaattgtgggaagaagaaaatagatgaactatgtacgcctaagggatcacatgcgtattatgagactgcttgagtgagtgagtccagcagttacctggtgagtgatctgttcttacactttagaaccttgaaagaagagccattctttcattgtaatagatcagatttggggacaaaagactgggaaagtgatgtacaaagccatttgacgccacacaataatagtactttgagagggccagtgtgtggcttagtgcccacgaggagatcagaatgcacctcaagctcccaaggcccagagggctgtggagatgctaactcagcttagaggctggggcaggggtcggggggcagtggaatagaggggagtggacaggacattttacaaaatttttttcttgagaggatttttttcttaacaattagtaaaagccatagaatcatggctggtgaattaggcccagccttcttcacttactagtatgggaatagatggcattctgcccctgacggctaaaacccaggaggaaataatgggtgaaaatctgaactaggcccctggtgggctgctcctatgtttgaagaaagggttgtgggtttttttgtttgttttcttcctggaaatataccctctctcttcctccttccctcctttctttctctctttcatgcacacatatatagacacacactgactttggtattgaagcaaagaaatatgcaccaatcttaaatttctttcaattcttttaaggacagttattccattacatgggaaaggagcaaaatttattatatttaaaatataagaactaaggtaaacaactttaaagggatcactctcccctttaaaattatgctatgtctcttgtgtaccacagacttcactttggtggatggtggggccaccaccaagtctctatctaacaggaagttttttaaacttgtttttttttacttgaaggatccttacagcaataaaaaaccttggatagttagaaatgatattgatctaggtacatttattagatgtaatgtaatgtggttatctgttggtgggcaggtctaaaaggcatgtgggtccaaacactgcccagcttctaactctggacgataaaaactgttgatttatggaactgaaatagctagggaagtcagggtttccttcctgttggagacagcactgggggcattaaatccctgtgggatcttgatgataagaaataagctgacctcttttggaattgggaaataactactgtgtcaagtggttccatccaaatgaatggatggtgttatttttgatttctagttttaagtttgacttcatcctctcagaaacttgactgcctttgtttatactggtgtgtcttttgaataagagtttttcctttttttttttttttttttttttgagacagagtcttgtgctctgtcacccaggctggagtgcagtggtgcaatcacagttcactgcagcctcgacttccgggctcaagtgatcctcccacctcagcctcttgagtagctgggactacaggcatgcgccaccatgcccggctaattttgtatttttgtagagacagggtctcgctatgtttcccaggctggtcttgaactcctgagttcaagtgattctctcactttggcctcccaaagtgttgggattataggtgtgtgcctggcccaagtttattgtgtgtgtgtttttttttttttttccagacagagtctcgctctgtcacctaggctggagtgcagtggtgcgatcttggctcactgcaacctccacctcctgggttcaagcaattctctgtcttagccacccgagtagctgggattacaggcacccaccaccatgcctggctaatttttgtatttttagtagagacggggtttcaccatcttggccaagctggtctcgaatccctgacctcgtgatccacctgcctcagcctcccaaagtgctgggattagaggcgtgagccactgcgtccggtcaagtttttttttttttttttgaaacagagcagagtcttgctctgtcacccagcctggagtgtagtggcacaatcttggctcactgcaacctctgcctcctgggttcaagccattcttctgcctcagcctccccagtagctaggattacaagtgtgcaccactgcgctcagctgatttttgtatttttagtagagacagggtttcaccatgttggccaggctggtcttgaactcctgaccttatgaactgcctgcctcggactgccaaagtgttgggattacaggcgtgagccaccgtgcctggccagtttattcttttaaattggcttataaggggccaggtgcggtggcttacgcctgtaaccctagcactttgggaggctgaggcaggggatcacttgagatcaggagtttgagaccagcctggccaaaatggcaaaaccctgtctactaaaaatccaaaaattagctgggcgtggtggcacatgcctgtaatcccagctactcgggaggctgaggcacaagaatggcttgaacctgagtgagaggcagagtttgcagtgagctgaggtcgggccactgcactccagcctgagtgacagagtgagattccgtgtaaaaaaaaaaaaattataagggacaagtgaacacttaagagctttacttgtgtggccataagatatggtgtatgtgtgttttctagtgcaatttacattacattaaaaattagaaagtgttaaatcttctggcccatgtaacttcctatgcgaacaaataattcaggaacaaacactttcatgcctaagataaaacattttcatgcttggtgatgggggtctggcagtgagcaggactgacacagctggccttccagaagcttacatcttagttgcagacaaataaacaagcaaatgaatgaaagaacattgtgaggtttcttgagaatatccctaagtgctgcagctaccctcattgggagcttcaggtggggtttcttggaggtgtagaagtgaaacctcactacctctttaatttcctcactgggctcctgtttcctgtctctaaaaggagacagaaattatggcattttcctacttgattgttggcgatagttgattcatgaccactgtggctgtaatcttggagaaacgagagaaactagaatggtcacggcagggagcattttcaggtttgcctttgtttctttttttttttttggagacagtcttgctctgtcgcccaggctggagtgcagtggcgtgatcttggctcactgcaacctccacctcctgggttcaagtgattctcctacctcagcctcccgagtagctgggattacaggcacctgccaccacggctggctaattttttgtgttttagtagagatgggggtttcaccatgttgcccagggtggtctcgaactcctgagctcaagcaatcctcccgcctaggcctcccaaagtgctgggattacaggtgtgagccaccatgcctggccaagtttgcctttcttgaagtcagtggagacgtgtttttggaatcctgtggcatttcttcatggcaatgcatattacactaagtgataaaccgctctaaaagcccttcccttgttgaaatcttaaaaacattcagacaagctggggctgcctgggtgttggtggtggtttaggaataatgagatttccaatagatgactgctttgttatgtattggtagactcttggtgcatggatttccctctgcccgggctttcctcttttttttttttttttttgagatggagtctcgctgtgttgcccaggttggagtgcagtagtgtgatcttggcccactgcaacctctgcctcccaggttcaagcgattctcctgtctcagcctcctgagtagctgggattacaggcggcatgctgccatgcctggctaattttttgtattttagtagagacggggtttcactgtgttgcccaggctggtcttgaactgagctcagaaaattcacccacctcggtctcccaaagtgctgggattacaggcgtgagccaccactcccggcccaggctttcctcttacactgggactgggaaggtgctgtttagacttttttatgttgggcaaggctggaagtcttagatttgacaggtgcttttcttaagtaagtgtatctgtgagaggtggggctggagagcaaggcgggatattcattttgggcacagcctcgagggcaagagggagggtgttagaaggagagtttctggttgtctttttttttcccttccacccaagttctgactctggaggtggagaggcaggcccaggccggaagtgggcgtggacaagtaatgcaactgtgcatgtgaccaggctcccacctctgggctctgctgcccttgggaagtggatgcttgctccctcctgacttcctgttctccctccttacaggctgagttcttgggctccaagttgagcacagaaaatacgttcaaggccgggcgcggtggctcacgcctgtaatcccagcactttgggaggctgaggcaggcggatcatttgagcccaggagtttgagacctgcctggccaacatggcgaaaccccgtccctactaaaaatgtaaaaactagctaggtgtggtggtgcacgcctgtaatcccaggtactctggaggctgaggcaggagaatcacttgaacccaggaggcggggtttgcaatgagctgagatcatgccactgcactccagcctgggcaacagagcgagattccgtctcaaaaaaaaaaaatagaaaacatgttcaagttaccccttttccttggtaagccgctttgtcagagctggaagccaccagtggacctgtacttgccagttttggggtctcaactaatacacccacaaactcagaggcctatctggcagggcggccaaaaagatggtttcttgttatattatcacagtgttcccctcgggagcttgtctgcaccaagagctgcctggaggtgtgtatggaacttaaagaatccgacagtagataggtccttcaggaagagtgtgttcttgaagaatcgtttgcagttacttacagctttttgctttataaaagtacggtgggagtccctgtgccatagaaactttagagccaaaaaactttgggcttgatcctgattctaccacttgctggcatgtgaccttagaaaaatagcctaacttcaagtggcctactctttctgagcctcagtttcctcaaaattaaactcaaatcctcgtttgtgggctggtttgtttgtaagcatacagcaagcggccagactgttgtagatgcctagtaaaggtagttgttaaagaatcatatttaggagccgggcacggtggctcacacctgtaaacccagcactttgggaggctgaggcgggtggatcgcctgaggtcaggagtttgagaccagcctggccaacatagtgaaaccctgtctgtactgaaaatacgaattagctgggtggtgggcgcctctaatcccagttactagggaggttgaggtaggagaatcgcttgaacctggaaggcggaggttgcagtgagctgagatcatgccactgcactccagcctgggcaacaaaagtgaaactccgtctgaaaaaaaaatcatatttaggctgaccgtttctcttgaggttggcacctgaggttggacaacaatctgtggatgttaatactgcccaagaacaaaccagttgacactgggccaataggctgagcatgtctgaaggccagtgatctggaagttcctagtttggttgatttttcccagttgagatcccttagttcattgtagctttaacccctacagcctcaccttactgtactctccatatggacttgaagtgcctcaggaaacatgatggggtaattgggaaaaaggctcaaaccttgagctcaggtgatctgcctgccttggcctcttaaagtgctgggatttcaggcatgagccactgtgcgcgacctgtttgttaggtttctttttcttttctttctttctttcttttttttgagacagtctcgctatgttgcccaggctggagtgcaatggtgcagtctcagctcattgcaacctccacctcctgggttcaagccattcttctgcgtcagcctcccgagtagctgggattacaggcgcctgccaccatgcagggctaatttttgtattttcggtagagatgaggtttcaccatgttggccaggctggtctcaaactcctgacctcgtaatctgcccaactcagcatcccaaagtgtgggattacaggcgtgagccactgctcccagccgttaggtttcttaagtggctaggtgttctgagaagaggcatagcatgggcacaggcagagacctggagttgaaaacagccaagtgagttcccttgacctgaggaggttatgctcttctaaaagtcagagtttgagctgatcacattggcaagaaaagtccaaaattgcttccaaaggtagaaagttaaaatgtgctatagtaggatccaagattaaactcaaaatagtatttaaattgagcttttattttttttgagacggagtttcgctcttgttgcccaggctggagtgcaatggcgtgatctcagcttaccgcaacctccgcctcctgggttcaagcgattctcctgcctcagcaggagaatgagtaatgtgtaatgaggctaattatatatttttagtagagatggggtttctccatgatggtcaggctggtctcgaactcccgacctcaggcgatctgcctgccttagcctaccaaagtgttgggattacaggcatgagcctccgtaccgggccttaaattgagctttcaataaacattttcaatcaggaagcaatgatggccagtgaaatcagccatctagactctgtaatggtatactgtatatgtagactttaacctccaaaggagcttcaagagaacagacttcagggctgcttctgacctttttcctttgagaattgttatcatttaagctggtctaaaattcttaatacatcagaacagttttttgttttttttgagacagagtcgcactccgttgcccaggctggagtacactggcattactgcagctttgaactcttaggcccaagccatccccttgcctcagcacccagataactaggactacaggcgcatgctatcatgccaggctaattttatttagttagttagttagttaattagttgagacagagttttgctcttgttgcccatgctggagtgcagtggcgtgatctcggctcaccacaaccttcgccttctgggttcaagcaattttcctgcctcagcttcctgagtagctgggattacaggcatgcgccaccaggctcggctaattttgtatttttagtagagatggggtttctccatgttggtcaggctggtctcgaactcctgacctcaggtgatctggctgctgcagcctcccaaagtgcagggattacaggcgtgacccactgctaaccgccttatttatttatttatttgagatggagtctcgctcttgttgcccaggctggagtgcagtggtgtgatctcgggtcaccgcaacctccgcctcccgggttcaagcaattctcctgcctcagcctcccgagtagctgagattacaggcatgcactaccacgcccagctaatttttgcatttttagtagagacggggtttcatgttggccaggctggtttccaactcctgacctcaggcgatccgcttgcctcggcctcccaaagtgctgggattacaggcgtgagccaccatgcccggccagctaattttattttttaacttttgtctcactgtgttgcccaggctggtctcaaacttctgggctcaaggacttctcccaccttggcctcccaaagtgctgggattacaggcatgagacactgtgcccggcctagaacaatttaaacttactttcggctgggtgtggtggctcacgcctgtaatcccaacattttgggaggctgaggtgggtggatcacctgaggtcaggagttcaccaacatggtgaaaccccgtctctactaaaatacaaaaattaggccaggcgtggtggctcacgcctgtaatcccagcactttgggaggccaaggcgggtggataaccaggtcaggagtttaagaccagcctggccaacatggtgaaaccctgtctctactaaaactacaaaaattagctgggcacagtggcgggcgcctgtaatcccagctacttgggaggctgaggcaggagaatcgcttgaacccgggcagcaggggttgcggtgagctgagatcacgccactgccctccagcctgggcgacagagtgagactccgtctcaaaaaaaaagcaaaaaattgccaggcatggtggcccacgcctgtaatctcagctacttgggaggctcaagcatgagaattgcttgaacctgagaggtggaggttgcagtgagccgagatcatgccaccacactccagcctggatgacagagccaggctccatctcaaacaaacaaacaaaaacctacttttttttttttttgagacagggtctcattctgttgcccacgctggagcgcagtggcagtagtgacacagctcactacagccttgacctcccaggctcaagcctgctaatttttgtattcttttttgtagggacggggttttgccatgttgcccaggctggtctggaactcctgggctcaagtgatctgcccgcctgggtctcccaaagtgctgagcttacaggtgtgagccacctcgcccagccaatttttaaactttcactgcattttcaaactttagcctttatatttaacctctcaaattgtctctattgaaggttacctttttgacctaaatttgaaataaatatcttagtcttcccaaaacaggagttagttagatatagacctgattacgtgggcatgtgagagggcatggttgttattatcaagctgtgaaagagagaacaaactagaagggcactccacctgtgttttttaaataaattacgggcatttcactataaatggggggtttggggagtatacatcctgttaggaaaacatttgggaggaatgttttcctaagttggcagatctgccatttaacaaatggggagtagggtgtgaaatagatgccaagttttaaaaatacgtttttctgcatgtccaactaaggatatttattagaccgatcatgtgactaacactccttccctgcttggggggtttgaataggctgatttccagactcgaggctgtcatatagcctttttgtttttcctggtagttttctgattttttttttttaatctttaattcatagaaaacagtttacttccatccaaattaggtgggaatttttttaaaccatatgtagacacaaaagagatattccttgccaactagtgacacatggcagatgaagacagagtgggagatacacttccggttcacaacagcacttctgagcagtttgtgcttaaccctttaggggagcatttgtgctcagaaccctggaatagcaggacagtgccagggccacacagagactcagtctggaaagagcctgcctaactgcagatggagcctgaaccctgcgctgcagaaacactgagtgtaacgaattgtggttagagacgacattcaaaacaaacacacgttgacaaagtggaccatccctagagagctgtttttcagggagcttttcagcataaacgatggtgatggggacaacgggggctactgacccatgtcccacaaactcttgatctagtgtgagaatgttgtgaatgcaaagatgattcttgtagcagtggtgatacattggaagtactgtatttttcataaagcatcactgtaagagtccctgtagctattttctggtccctccctgaagaaagaatcaggagtatcaaagtattaaggaaatcaaaatcacttaataattaatcttttcttttcttttcttttcctttcccagccaattgcattgtaatctcaccatgtaaacatggatttggggtgaaataagaaactttaaaatgatcctcccttagagattgttgttatattgtccctaaacttaatgaaaacaattttaaactttagagtactaagaatgcaaagtacagaaagtagggcccgatgtggtggctcctgcctgtaatcccagcactttgggaggcagaggattgcttgaggctaggagtttgagaccaacctggctaacatggcgaaaccctgtctctactaaaaatacaaaaattagctggtgtggtagcacgcacctgtcgtgtcagctagtccagaggctgcggcacaagaatcgcttgacgccagaaggtggaggttggagtgagccaagatgatgccactgcactccagcctagggcaacgagcgagactctgtctcaaaaaaaaaaaaaaaaaaaaaagtagtcagtgttcgtttttcataaaggtgattaaaagaaaaaaaacttggctttttttttttttttttttgagaaggagtctccttctgtcgcacaggctggagtgcagtggcatgttcttggctcactgcaagctccgcctcccgggttcacgccaatctcctgcctcagcctcccgagtagctgggactacaggcgcgtgccaccatgcacagctaattttttgtatttttagtagagacagggtttcaccgtgttagccaggatggtctcgatctcctgatctcgtgatccaccctccttggcctcccaaagtgctgggattacaggtgcgagccactgcgcccggctgattcttcagtctttcttatgaatacattttctgcattgaaatcattttgtgtctttcagtggcaccagcctgtcagcttcgggagtatgtgcctgtaggcttcttgggctccaaaatccttgggaggagtggtctctcagttgtcgatcagtgtttatcacataagtcatcttgtatgttgtccaccaagaacttcaaataaattttctgattgaaaaagtaccaaaaaaaaggaaaagaaaaaggacagtaccttgaacattcagtaggtgatgctactctttttcagtagtttcatactagtttggagcctttggccaatttctgccataaaagcagacataaacatggaatttggccccaatttcttctcagtccctcagttgtatagggacaggctcaggtggtgtttagaagtttaagagtacactcgaaagaccattagtctatttttgctgtagttaaggtagaaggaggcctagctattattagtggggtttggtctatgaaagacaataaagtttaaaatgaatttggaagttttttgttattgttgttgttttgagacagggttgcactctgtcacctaggctagagtgcagtggcacaatcatggttcactgcagcctcaaactcctgggcttgagtgatccttctgccccagcctcctgagtagctggggctacaggcatgtgccaccaggctgggctaattttttcttttttatagagatggggtcttaccatgtcgacccggctggtttcaaattcttggcctcaagcaatcctctcaccttggcctcccaaagtgctgggattacaggtatgagccactgtgcccggcctggaagaaaattttaactaaataacaggtgttttgaaagtacagtattgggccgggcacagtggctcacgcctgtaatcccagcactttgggaggccgaggcaggtggatcatgaggtcaagagattgagaccatcctggccaacatggtgaaaccttatctctactaaaaatacaaaacaattagctgggcatggtggcgcatgcctgtagtcccagctactcaagaggctgagacaggagaatctcttgagcctgggaggtggaggttgcagtgatccgagatcgcgccactacactccagcctggtgacagagcaagactctgtctcattaaaaaaaaaaagaaaaaaagaaagtacagtattaattaacaacggctatcactaagggttttttttttttgtttttgtttttttgatttttttttttttttgagatggattctggctctgtcggccaggctgtagcgtaatagcgcgatcttggctcactgcaacctccgcctcttgggttcagcgattctcctgcctcagtcttctaagtagctgggattacaggcgtgcaccaccatgtctggctaatttttgtatttttagtagagatgaggtttcactgtgttgaccacgatggtctggaactcctgacctcaggtgatccacatgcctcggcctcccaaagttctgggattacagacgtgagccactgtgccctgccagcactaagtattgactgtctttgttttcagatcagagagaaaacttttagaaaacatggttctagccctagttgtttcttaattagagtttcttcagctttagtatggcatctgaaggtgattgcatcatatttcataatcacccagctgaactatttgctgtttagtccagcactgggcactgaggctaaaagatctttaatccaaacagcctcagcattcacccaacctgagcctatgggaccccaagcagatctggattcactgtcacttaccatctacccatctgaccctgtcttcctatgacagacagaaataaaccctgtagctatttcaccccacctacataccctgcacccctcctactccccgtccgactttcctggctgagaagttggcactgccctctggagcaggccctgtcaccagtgcacccctcactccacaggggtgtgtcattaatgtgttgcagttgatgcctccctcttaaaaaaaaaaaggggtggttgtcaccctggtgactcacacagggcttgctggctcaaactctggaatctgtatatctgtctcaagtgtcaggtctcccacctgaccacactttgctctgtttgtagttaattaaattgacattaatcaagacccaggtgaggagcagtgaggtaatagtttgcttgtattgctttaatatacatcatctgattaatgatcgtagcatgaagcagttcttaaaatatacagccaccatgttagggtgaaaaacctggatggttgccctaaaccaaccttgcgcttgggatcagggagctctttgaattcctataccgagtcacctgtttgagaataagactgttttgtttgtttggtttctgaatttgaacatttgaatttctttgtagcaaagcaaagcaaattggtgacataactgggtcagggaaagtgattgggagtcaacagtttgtattttgtatcatttttaggttgaattctcttttggcctaggggaggttgtgccagatgttgcattaagtagtgggaagattttggggggcagggcggtgtgtttggggaggtgtgaggtggcggggtggaataaactacaaaaagttgacaattgtatgtagaactcaacacagaattaggagcttttttgaactctgtttaaggggacatacagcagaaaaacaattttttttttttttagaaaaacaattttgtaaaatttgttctacatgaagtgtttttcaggtttgcggttgagacccaattattcttgggcgttacattgattttcttttcaaatgaagtagaatagaaataacagtacaggctgggtgcagtggcttatgcctgtaatcccagcattttgggaggccgatgcgaacagatcacgacatcaggagatggagaccatcctggccaagatggtgaaaccccgtctctactaaaatacaaaaaaaaaattgccgggtgtgatggaacgcgcctgtaatcccagctactggggaggctgaggcaggggaatccgtgaacctgggaagtggaggttgcagtgagccgagatagcgccactgcaccactccagcctggcgacagagcaagactctgtctccaaaaaaaagaaaaaagaaaacagtacgttgcatgtggtaaatttatgtttggtgaaacttttgtttcagttgtacatatagatttattagggtatgcgataaagcatgtcaccaccactcttcaggagtctaggtgtctcatcaggaatcgtttgttttaaaacaacatgaaaagaggcggttttggggattcctcagaacctgattttggtattgagagccttcttgtggtagattttccatgaacttgatattttccctattgaaattgtatttcgctttatgtagtttaacatctccaaagtccattctctttcaggctttcattctgtctcctgtgtttcctccttgttactggagagggaggggtgcagatttgctttcttgaggggttttcaccttctccctgaggcacgagggcagattgggaggtaactggagagggagagcagtcgtccccaagtgtcttgaggtgggtgggtctggagctttctttgtagaattctgttcactgcactggagaagtgatcgttcagccgatccacaccccgccctccccacagacaccggggccgaagttcccagagaagagcttccgcgtgacgaccccgcgggggtgacattctaacccgcgtttcagaggcaaccctgagttgcttgaggtcgcccagctcagctggcgcgaggtcagcagtgagcgcgtcgtgagtcagccttgggtgcggcccgcccggctttgccgccggtgagttggccacgacccttcggcctgcggagggcgctgggactcggcggggagggagccagccggagcccgcgtgggaaaccagcgcgcccaacgaggtgtcgcgtgggagcgcgccggagaggggcggtgcttccggggcggtaccgtccggccccgccccctcaactcaggggcccgccttctacgcctggaaccccgcccacgagctcctcccttctcgtcaggccccgcccctcggtcgccacgccccgcccagccgggcgcgggcgggcggcgtcgcctttaagagctccccggtgttttgggggccgcgggccgggcgcgctgacctggtgcgcatgtcccgggcggtgacgccggcgccgggctccatgtgtgcggccgaggggcgcattatctggccggcggcgcgggcgggcgggcggaccggcgcagcgagcgccgcgggcccgggcggccccacaggcggaacgagcgcgcgcggcccggcgtccccggcccctccgccgcccggccccgcgggcgaccccggaccagcagcccccgtaacctgcgcgctgccctagggcccggccgacccgcggcccggtaagttctggaccaaacttggcggggggcgggggctggggacgcacggctgagactggagcggcgcgggccgcgcagggtcggggcctcggggggctctgaaggacccctgcatgagcgtggaaaagtgagagcgagcgagttctactccttgtattctgggagcgtcttcttgcgctgccctggaaagttccttgccccgaggcggcccgggcacgtgggggccgggcgggggtcccggaaagtcgcggcgtcgccccgcttccgtcctgcgcttcctgcggggtcgggggaagggctgggccgcgaggcgcctcttccgagtggtcgggacgggtggaggcggcgggaagacggcacgtgggcgcgcggggcgggggtcccgctcaggggcgggggtccggggcgggttgggcagcaacgctgaaccccgcggcggcggcggcggcggcggcggcggatcccgtgtcagaataagagtccccgcgcgcccacgcctggagggccggccctcccccagctcgcgcccttcctgcctaacccccgggagccgcgggaccctttcccctctctgatctccggcctttctcaaggcccgacactttaaatttgcctccccatctaggcggtggctccattgatttcttttttcccacctagagtgggtcggcatcagtgactagacagcagcagctggccttttaaagggattattgccaagaatcggaattgatcacttcaacaaggaaaggcttatgggcagggcccaggctgagagcctgacggacacttggattgtgcgcacactgggacccagaaatgaatggtgacccctcccttaggaagtgaatgacaacccttaggtgcgtgtttctgccctgagaattttgcacagggcaaaattttgtaggtctgacttaacgtctttaggtgtatagttcatccttatcttaagagctgtggattctttagatcaaagtccgagtgagtcacttgagcctttaattttctttcttcctaccagtttacttctttcagttttcttggagtacatagtgctggttacatctctggttctgtgtgcccattcacacagtgacacctcctggctgtggcagcacagaaactgagagccctctgtgcgggtgtctcagtcttggactgtagtcctgttgactgacttaactcttctggtagtcgttacaagttttcttttaaactagattacatgaaataatgtttgttggcaccagtttgttaacatatgctaagcagtagtttgtcagacctgaccacaagctgtggagggctgatagctcatactagccctcgggtttgagtgcctactgtgtgctaagctcccctgcacagacatattcagtgcctataacaatcccgtggggagtagggaagtattatctgcgctttacaggtcaggaaattggggctgctggaggccaggcggcttgctcaaggcctcttagtagtgaggcagagccaggcagcccgtacttggtgctctagagcccacaaatgctgcagtttgcgaaccctagtgagcatttccctggcgcttctaaaatacaaggccattttcttgtccaggatccagggcacctctgtttgcggatgtaggggataatctggtgacatggggacaccatgctagccctgctttgttctagtggagcagcgttaccagctggattttaaggaactgaactacagagttagttgctactttgcattcgcttcttcagctttggactcagaaaagttggcccttttctagaggaaacagtttataggatgtgggaaatttgcaagggattttctgtatcctctgtcttcacttattccctcccctccttcatctttcagttcttatttgtctcataaaattccgaagctggtttttatgaagattgcttctcatcttggaagggctatagagaatggaaagatttggatgcagtgtgttttgtttgtttgtttgtttttttgagacggagtctcgctctgtcatccagtctggagtggcacgatcttggttcactgcaacttccgcctctcaggttcaagcaattctcctgcctcagcctcccgagtagttgggactaccatgcccggctaagttttgtatttttagtagagacggggtttcaccatgctggccaggctggtctcgaactcctgacctcgtgatctgcccacctcagcctcccaaagtgctgggattacaggcgtgagccaccacgcctggcggatgcattgttatttccactcagatgacatcattttttaaaatgtcaagtcatctctattaatgcagtatcatttggcaaatcctataatcttatattttgatagtgagggaaaaatataatgctactttcggtaggaaaaaatcctggaaggatttgtaccagaatgtcaataaaggtctctacattaggattagcaatagtttttcttttttagaaaactttttagtgtctctgtattttgcgtgtgtgtgtatgtttttaatgaggaaacatgttttaaatactctaattttcaactcttcagtagctcctctgacttgttttgcatcatttattttctgaatttctggcattgcaggtagtgatttctagattgatatattcaacaaatatcagagtgcatactgtgccttcgacactgcgaggaatccctcctcagtagagtttatagtgagattagtgggccaggagtcgtaattaatcttataaacatggggaaacttacagggatcaaggagagaaggacactgtgacctggtgagcccgaaaggacctttctcctactggggtcagagaacaagaagggggaccctcttgaaggggattaaggcaagggctggtgcagtgaggctcacagccgggacctctttgggtcttagcagatgactaaaggatgcctctgaagaatgtggctggtaaagttgtaaagccattcttgaaatgttggctttttttttttttttttttggtgtttgttctcttggaagaaaattaagaatgaccagcagagttttggatatatgaattcccaacagagacaaaaatgtaatggcccttaccactgaatttgtttaaggaccatcattagcatgtactgacacctcaaagcctgggcagctcagatgcttttctggagaactacctgcttggactcggggtgtttctgtgccatcaaatggaacaggcagggctattttctctagacctttcccccccataattgagttaatttatgctggttgtagaaaactaggaagattatgaaataggtgagtgggtgaagtcttctcgagcagctgtcctggggtaatagagcatccctgggatttcctcctaacccttgtctggttgggaagtgtggcagaaccagaagaacaagttggcaatgtcatagtttgaggcatacagaactatgctgcctgctaagtgtggtcgtttgttagaatggatgcttttgagttatctgagctgcttcgggaggtagctttccacagtctggcctcagactgtgggtcttccaggttaacaggacttaagtgctaactgtgcaaaggtatgtctttgaatggaattaggaaggcagtgtattaaaaataagaaggttgagataaaaaaagacggatcttgaagtggttggtggttgcagcgaggtggaaatagtgagacccgtactgtcagaaacaaaggtaccactggggacagatcccgctcgagcatgggttccccagcatccccgcaaacaggatctgggacttttttgtcaagagagtgtcagaccgttggcttcttgcccctcccccaccttgtgctttccagactatatttgtgacctctttttgtctgatggaaatgtaggttagtcttttagaagacaaaggaatttaccctaatagaatacctttaggtagcctcaggaagtgattgggaatccacgaaaccctctaggtgtgggagagaggggccctcagtgagaatgtcacacgtttgcaccagtttgcacagttgccagggccccttgcagctcctctgtacgctgtaccccctttgtctctcctcagcctccagaggcaccttcacaggtgagtttgtcagggaacttgcctttctgtctgattcctgattttagggttccttatatggaagggctgaagacctgcaatttccgaggatgctggaggctagcttctgagataggatttgctggcaggagatgagcagtactctaaaggagggctcccagcaagtcaaagtgggagttcttggggcagggggtgggggatgggggtggtgggtggagtggtcaaggcttcagggctttcctgctgcttggcctcaaagatagtagctatgcctgtggggaggggtgtggccatgtggtacaggattggggagaaattccacttgtttgaaggatttgttgaagaatccctcagctattcctcctgcagttccgtctcaggacctggcgctgcgtggcctgccttgccggttagatattctggtttgaaccttgaaacgtagcctaaataaggtggtgccttcgagcacacactttaaaaatactgctgcattatggtggcacagcagctcctcctgtgccaaggaggccactttgagtctagggggcacctgctttttgccaagtgtggccgtgtgcctattgctgagcagcctgtctctagtggcatccaggacagccctggctttgcctcaagacagcctggtgtgagctctgcccagccacttcctagcgaaagaccttgttgaacatcacccctgtttcccatttctgtcaagggggtacttactatctcccgtggaaggctgtgttgggagtgagataacaagtgcaaatgatcgaccccagtgcctgtgtgttccacatgttgcagttcagtgagtactgttatgactgtaacagatgagccagagttcacaagcattaacaactgccccacctcttctgtgggggatgacaccaccctcatggcaaactgtcactgtctgcatgccccctttggagccacactggggcgcatgcctcagctttgtgccccagcctattcccctctctccatgttcctgtgaagaaggcaaagttccccacaggaggtgatacttgccatagtcaccttgctcattattcggcggctgggacccaacccagcctttctgatttcagacgttgtctattttttccactgccttggggccttcttgacgatactgaatgcctgggttggttgtgccccaagccaggaggcagcctctttcctggcccagggcttgtggaagccagcatccggacttccatctgtgagatgggaagctgtttgccgggcagatctgtcatgggagccttccttagagaactgagaggggtccctgtcactgagtggactctgggtggaggctggaagtaggtggtttgatggtacttgcagtggtgtctgggagcgccagggtgaatctcatcctcctggacttgcctttcagactgacagctctccagccagcttggagttggacagatctggctttgtcactgacgatatgcagtttaccactcttcagcgttgggtgggtcacctgatcacctggcctcagctttctcttatgttggcggagacagcatctttgacctaacaggatgctgtgaggacaagtggaaagtgtctacaggcagtcaggggtattccagcctttgcctctccatttacctcagagccaaaaagctttctccccccagatgtcaactacacagtgattcttgaacacctcatatctcagttatcacatataatgtaacactcagattgaggagcttggttttctttataacagaatcctactgcaagctaacaatttggaggcctaagagtcaggtcaaggccgggcgcggcagctcacgtctgtaatcctagcactttgggagcctaaggcaggctgattgtttgagcccagtagttcgagacccgcctgggcaatgtagcaatcccccatctctctctctctctctctcttttttttttggtgggctgtctcaggccgcttttttttctctctctttttttttaatttttaattttttttttaatttttttgttgagacggagtcttgctctgtcagccaggctggagtgcagtgacgcgatctcagctcactgcaagctccgcctccggggttcatgccattctcctgcctcagcctcccaagtagctgggactacaggtgcccgccaccacacccggctaattttttgtatatttagtagagacggggtttcaccatgttggccaggatggtcttgatttcttgaccttgtgatccacctgcctcggcctcccaaagtgctggcattacaggcgtgagccaccgtgcccggccgattccccatctcttaaaaaaaaaaaaattagccaggtgtggtggcatgcatctgtaggccctgctacttgcgaggctgagatgggaggatcggttgagcctgggaggttgaagctgcagtgagaggagatcatgccattgcactccagcctgggcgacagagtgagactctgtctgcgggggggataaaaaaggtctgatcagattatctggaagggatgtgaaaaaccctgtggccctaactctacaaataataccaacttaacattttctccagtcacagccattctgtgcaattaacctttgagtcagtggctgtgaatctatactcaacacattcttaccttagagacggctgcttgccctgacctcggaggtgggcaggttttaggccagtaaagtaggcctccaatttacgatggattgacttaaaatttttcaactttatgttgggtttatcagaggtaaccccattgtaagtcgaggagctccctttgatttgtaacagtttctcctgaacacagatccctttcgtaccatggtaaagttgagaaattttaagtcgaataattgtaaaatgggaccagtggctgtgttaaatgcatttgatattttctactcccagtggggctgcattctaataaacccatcataagttgaggagcatctgtcttcttgttgctggggtttcaagttggtggaatttggtggtagtgacagcagatttttagttctcttgtgtgtttagcacaggctcactctgccagcaagttttgaaaactgctgctaccaccttcgttcacatccgcagaggaacatttttccttgttgctcaagtgtggctggagaaagtaggagagtggtgaactgaattcttggtttgaaggcatcgattgaattggttccgtcactctcgagacctgtgctgttctcaggacttgcgtatcattgacggaacacctgaacttcattttctgtcttctcatgtagtgtccctgggtttgccgagggttcatgcccaccccgttcagtggtggttctttcagaggattctgtagtcagctcctttcctagggttctcttatagccactctaacccagggagagtttgctggtgtgtttggtgtttttgtttttgtttttttgagatggagtctcactctgtcgctcaggctggagtgcagtggcgcaatctcggctcactgcttgaacctccgcctcctgggttcaagcgattctcctgcctcagcctcccgagtagttaggattacagacacccataactttgcctggctaatttttgtatttttagtagagatggggtttcgtcatgttggtcaggctggtctcgaactcctgacctcagatgatccacccaccttggcctcccaaagtactgggattacaggtgtaaaccaccgtgcctggctgtgtttgatgtttttattaatacgttcgtttgatgaactgacctcggtagtttgtatgtgggccatctgtctcctgcctcccttccccaaacttttggtcaagtttttagtgttgagtctttttgttgttgtctcttttctgactgtacaagcaacatttcctgatgccgaagtctggggagggggtgggagcctcagatgttggtggtaggagttgcctggtctgcttttgaagttttcttgggcaagtatattaacatatactgagtataggttcaaatgtaattgcagtcttattgttagtttgtatctgtcaggttataggattagaaatataactatttttgggagttgggtagcagacaaactgaggattctacctgggactttcttctgtgtactgtgctctgctgaacccaacactgggcacaaacaggaaactgaggctcaagcggaggaggagtggcctgcccaaggttgacttgcagaaggaatgaggatatatccctgttttctcctggaattagactttcagatctctgttgttcttactgatgtctttgtggcttggtgaattttgttttagcttccttcttactttatttatgtaggtccattggtcagtttccttcctcagggccttgtctttttttttttttttttttttttttgaaacagagtcttgctccattgtccagtctggagggcagtggtgcaatctcggctcactgcaacctctgcatcacggttcaagcgattcttgtgcctcatcctcccaagtagctgggattacaggcgcacgccaccacgcccagctctttttttttttttgtagagatggggttttaccatgttggccaagctggtcttgaactcctggcctcaagtgatttgcccaccttggcctcccaaagtgctaggattacaggtgtgagccaccacaccctgccccctttttttttttttttttttttttgagtcctgaggtcattttgggtgtctgtagggtgaggatggggcaggacatggggagggagaacttagggctgcctctggtttctcagggcagccttaaaaaaaaactatagtggccaagtgtagtggctcaggtaaccttagctctttgggaggctgaggtgggaggattgcttgaggctaggagtttgagattggcctggacaacatagtgagacctgcccccgcccccctccccccaaaaaaaccccaaaaaactgtagtagtgttgagtaggtgatgtctttactttttttttttttatgttttttagacggagttttgctcttgttgcccaggctagagtgcaatggcatgatctcagctcactgcaacctccgcctcctgggttcaaacaattcacctgcctcagcttcccgagtagctgggattacaggcatgtgtcaccatacccagctaattttgtatttttagtagagacagggtttcttctccatgttggtcaggctggtcttgaactcgcgacttcaggtgatctgcccgctttggcctcccaaagccctgggattacagacgtgagccaccacgcccagccttttttttttttggagatggagtctcactctgttgcccaggctggaatgcagtggcacaatcttggctcactgtaacctccgcttcccagattcaagcgattctcctgccccagcctcccaagtagctgcgattacaggcgtgcgccaccatgccgggctaatattttttttttttttttttttgagacagtctcactttgtcaccaggctggagggcagtggcatgttcttggctcactgcaacttctgcttcctcggttcaagcaattctcctgcctcagcctcccaagtagctgggactacaggcacatgccaccacgcctagctaatttttgtatttttggtagagacagggtatcaccatgttggccaggatggtcttgatcccttgacctcgtgatccacccaccttggcctcccccaaagttggaattgcaggcatgagccaccacgcccggccgactttacattttaagagcataaaactacttttccctgtatggttttttttcccccccaagagacatggttttgctctgtcacccaggctagagtgcagaggctcatgatcacaatcactatagcctcgacctcctggacttaagccatcctcccaccttagtctcctaaagcactgggattacaggtccccatctattataagatgtaattgcacttaatttgtagacatccttcaagtgatatgtgggtgaccatttaaagatacaaaaaaggagcacatggaaatgggaggagccaactaaatatcaggtcctgcactgggctccagtggttgactgtgttagtcccgggcaagagcgagggccttaacactgccaaggatgctggatgagacctggttaaggaaattgaacatgttttgttcagatgagagatgatttggggtgggggtggtggcaggttccggaaggccccaggatcttggctcaagactggactgaaggcctttcctgatgctggcaccaggcaggcttgctcactcccttgggaaatacagagggggttactcttactttccagagatgagatcaggtgaccctattgcaaaaggcagcagaagtggacagtggctacctggggaaggagctcagcattgagtgagcagctcagaatcttacactcaccttctatgaagtttaagatgaagggagctgctctactctgttgccttggtttattgcattagggaaaagaatacttaaattgcttggaaaaattggagtagttttgagctgtttagccagtcttctgagtttgtaaactactcttggttgtttttttttttaaactttttttttgttttgaggcggagtttcgctcttgttgcccaggccagagtgcaatggctctatcttggctcactgcaaccttgtctccagggtccaagcgattctcctgcctcaacctcccaagtagctgggattacaggcatgcaccaccatgcctggctaatttttgtatttttagtagagacagggtttcaccatgttggccaggctggtctcgaacttctgacctctggtaatctgcctgcctcggcctcccaaagtgctgggattacaggtgtgagccaccgtgcccggcctaaaacttattttttaaagttaatccgttgacattttagagcttaagctgcttcggcagataccctgtggaatgaaatgcagctgggctttgcatcaccacacagtgaagtgactggtgtaggagatgtgttgctggctgtaggattctctaagcagagcttcttagttggtgggctgggatgagtgacaggggtgcagacgtccttgtgggtaagtggcccctgcccttgaccagctccttaggctgagaatagcctcatcttactccagtgtcttccacacttagaattcttactacatggcagaagctgaaaaagatggggcatctgattacccccccacccactattctgagaagagagatgatttttcttggctctctcagtctcagggtatccacagctcctgtggagaaggggttcctctgcacgctgcactagaggagtgttgggtgcggggggtggagttggccattcaccctcctggacctcaggatttatggaaagtcatactgggaactaagggcgaaagcacaggttgctgtggttattgttgatgtcctgaaacaggagactgttcatacttcactctcaaaatatggagagccctcagaggtttctgagcatgacaatatcgacttgaattgggcagaagaaaggccattgataaaaggcaggcatgagctaatatggccttggatttgcctgacggaataaaaagcagggacaggtgccagagacactgcaggaagattgggtagggattaactggataccaagggctgaggacagttcatctgtttgacaactgttggagtgccttccctgctcgaccagtgctgagccccaggggtgtctggttgtgagggagattcctgccttccggggtcttagagcctcgtgggggaaacagggcagggtgtcatgatgcagacatctggggcactcagctaaagggcgggcaggagcggtgtcgtagcagtggcagctgaatgacgactggagggtgacataggccctcagattgtggatctttggttttaggggtagtgagctaggtcctggagggtgctctgggacagctgggtattggccctgggcagtcattgtcagctgtgatggccgaggatgcagtgggtgaggtgtggaggccccatgtgaccatcaggaccttcatgaatgaagagagcatggctctctgaccccatctgactggccagctccaggggcaggtgtagaatttgatccgtcctcgtgtgtccccctctccaaactgtagtgctttgtgttaggtgaaagtgtgacaagtaatagttgaaagaatgaaatatccaagggaccatctccatacattggaaaagtttgttctgctctgttcctatgaatgaaatagcagcagatggatggaagttcgaggaacacagacttgacttagcctgagaaagatctttgtagcagttggaggtatcgggaagaggctcagtgtgaacccagagccctgggagctggttgggaacccacattttctagatttctgaggattttccagcttgaggttttggacacttttccagaaagacccagagcgattaagacacgtctctgaaacaaccacatgaattattctaacagctgctgcttgctggttttaggaagtttccttgtttcatgcactgctcaaatgttttcagattctagctcttttggcagagtttgggggagaagacaggtgggtgtcccgctgtgacactggttttgagagtggggaggggttgtggtcgccggaaggaaaagagccctggggatttgccacttgggtaaaaatgacttggtatctgactagtaatcaccaagacccaaacagggtcattttggggtggaagtgaagtatcagatgagttaggtgggagtgggctgggatgtactctggctactgcccactccaaaaggcctcctagctgggcctgggctgtctctcagggcctgtaccctccaccatccttgaattcagtggccagggaacccgtcccctccccctggtctgtgcctgctctgctcattgcctcacatgtgtgagcactcggtggaaggaggaagggatgtctgcacacactccctgtcgagggaccctggcttgctcctgtggtgccctaagcatgtagttggcatgcatgtgtgtcacaatgaaaatgaagatgagaattggtcctagtttatgacccaggccgggtagtatttgtcgatccttccagccccttcctgcatctcgtacactggcagacagggactcagaggccaggtggctgttcctgcccatggaactctgagggtttccatgccttctacagctgggctcagtcctgggagtttctagcaattcagtagagggttaggttaacgtgcacttagaggaatagaggaatcctgggtctgtaatgatctctacatcttttttttttttttttttttttttaagatggagtcttgttctgtcacccaggctggagtgcagtggtgcaatctcagttcactgcagcctccgcctcccaggttcaggtgattgttgtgcctcagctgctcgaatagctgggattacaggcacaagccaccatgcccagctaatttttgtattttagtagagatggggttttgccatgttggccaggctggtcttgaactcctgacctcaggtgatccgcctgccttggcctcccaaagtgctgagacaggtgtaagtcaccgccctggatgatgcctacctacatctttggtagaggaagttttcccagagccttgggaaggatccagtcctaggaccgtctcaatcagattgttctcaatggtacagcggttcaggtttgagcctgggcctaggaggtggctgacctgggtctggattcccatctgacttattaagtgtgtgaccttgggcaaccatcttgactttttttttttttttttttttttgagacagagtctcactctgtcacccaggctggagtgcagtggtgtgatctcagctcactgcaacctctacttcccaggttcaagcgattctcctgtctcagccccctgagtagctgggattataggcacgcaccactatatccagctagttttttttttttttttttttttttaagtagagacggggtttcaccatgttggccaggctggtctcgaactcctgacctcaggtgatccgcccgcctcggcctcccaaagtgctgggattacaggcgagagccgtcgcgcccagcccatcttgacttttttttttttttttttgatacggggtctcgctctgtcacccaggctggagtgcagtggcgcgatctcggctcactggaagctctgcctcccaggttcccgccattctcctgcctcagcctcccaagtagctgggactacaggcgcccgccaccacgcctggccaattttttttttttttggtatttttagtagagatggggtttcactgtgttagccaggctgatctcgatctcctgacctcgtgatccgcccgccttggcctccgaaagtgctgggattacaggtgtgagccaccgcgaccagccccatcttgactttttttaacctcggttttctcttctgtcaggtgtggatatcggcggtagtcccttgcatgaagtgctgataacagtgtgggttccatcgtgtgaagtgtgggtacgatgacagtccctcgtgtgagtgtgggtatgatgacagtccctcgtatgagtgttggtatgatgacagtacctcgttctgtggttatgaggattaaatgaaatcaggcatgtaacgtgttggcacattgcctggcaccaaataaagaattcagtaattgttagccactgtttcctctttcagtaacaaaacctcttgtcaacatattagagatgattctcttggtgtccccaaagttttcagaagtgcgcttttctctagcagtttgaatccaggtgcctagcggtaactttctccgttgagggtcaggtcctccccatcctgcctcagcaatgcccgacggacaatgggggaggcctggactgtgaggatgcacgagcagtcccattctggggacagagacaagcagggcctggcttggctgcatgttagtgctggcataggggttaggtagggtctggatctgcttgaggtggcttgagatagagggagggagggccagggaggtgagggcagtaggcctccttggaggaagagaaggctggcccagtgaaagccagttgaatggatgagtgaactaacgcccctgcccctatggccctgcccctcctcaccccttctggcctgtactgtcccttcgcctgtccataccagtttcccagggcatgtcttgcatgtaggttgggttgtctaggcagcgctgtgcttcagtgacactttgtggttgacttgggaccctgaccacactgagagcagcgcgcttctctgggttggatggctgggttctcaaggaccaacggcttagaattgtggagggtggagtgtgtcccggccctgtgtttgtttgcctgcctgctgacatgaagcctgatgtgtgcagccactctactgtgtgcgagggaagaaagacatcctagtccgtgttggacatgggctctgtgtggcagagttcagcctcttgtggggccccgtcttactctgggggtgatgcaggtaaagtctgctgaggacctagcctaaggctgtgtagtctgacagatttcttcagaccttctctctcttttttttttttcttcttttttgagacagagtctcactctgttgcccaggctgggagtgtgcagtggtgcaatcttggctcactgcaacctccaccccctgggttcaagcagttctcctgccccagcctcccacgtagctgggattacaggctcccaccaccatgcccagctaatttttgtatttttggtaaagactagggtttcaccatgttggctaggctgatttcgaactcctaacttcaggtgatctgtcctccttggcctcccaaagtgctgggattacaggcgtgagccactgcacccagccagaccttcttatttttaggcagtgattctagtgaaatttacattgttctttataacatatcagcattttcatactgaagcctcttcccagcaaggaaaacgccatttgaggcagaaacagcaagcatatttcaaggctctgggattgcttgcttcccaccgcaggaggcaggcggtttggcctttgctatctggctcctcttggagcagggttccccaggtgccagcccccaccagcacagtttttctctctgcttgctccctggaagctggctgttgggccacacaagcagaactcctcctagctggcagagccccacgtccacctggcacctgctttccccaagcctcggtgtcccttctgtgacatctaagacttcagggaggcattgcttcctccatcttggcctcagtttatcctgtaagggctggggatagtggtgaggacagttgacagttctgtgaaacactctgaggagcccttgctcttcttgcatcttccaatcatacttttattgtctgatactatacattgtcaaggaggtgtggagtatgtgtacagccttgcatttctctattctttttgtttttgttgtttttttttttttgagatggagtctggctctgtcacccaggctggagtgcagtgacgcgatcttggctcactgcaagctccgcctcccgggttcatgccactcttctgcctcagcctcccaagtagctgggactacaggcgcccaccaccacgcccggctaattttttgtatttttagtagagacagggtttcaccgttttagccaggatggtctcgatctcctgaactcatgatctgcccgcctcggcctcctgaagtgctgggattacaggcgtgagccactgcgcccggccttttgtttgtttttgagttaggatttcgttctgtcatccaggctggcgtgcagtggcacaaaaatggctcactggagccttgacttcctggactcaagtgatcttcccacctcaacctcccgagtggctgggattgcaggtgcgcaccaccactcccagctaatttgaaaatattttgtagagacagagtcccattgtattgcctaggctggtctcaaacgcctgggctcaaagcagtcctcctgtctgtctcccaaagtgctgaggttacaggcatgagccaccacacttggcctatttctctcttaattggcgtatgcggtggcggctgagatttgctgatagattttgccattgttatagtttcttcatttatactttgcagcatttcagtcatcacatgatttttgtgatggctgtggtgcgtcatcagtttgccgcagtgatgaagcttctgggactaagaaccagcttgttggcctggttcttgggcaaggccctgagaatcctgggctgaatgcccccctgagctgaccacgtggccttagccagggccattggtgccatggcgtggttagtggatggttccagccaagtctgagaatttaccgaattgactgtttgatttggcagctgatggtcagagaaattgaattctgcctcttagcaaaggaagcttggtggatttctagaattctttgttgtagagggggttggggatggcgtgggcagaatgaatgcgaagtgtgggggcttgaggtctgccaggccctcccacttgccctaaactggacttggaggtgtctggaaggttgtgggtggacagcactgaccttgctgcttggccagttgttccccagccactctggattcggatctaggtggaccctatggtatcctagaaactacctttatgttcttttcttttaagaaacagtgtcttgctctgtcatcctggctggagtgtagttgcatgatcatgggtcactgtaacatttaaactccagggctcaagtgatccttccacctcagcctcccgagtaacttgggactacaggtatgcaccaccacacccagctagtttttaaattttttatagaaacagggtctcactgttttctagggctggtcttaaactcttgggctcaagtgatcctcccacctcagcgtcccaaagggctgggattacaggcatgagccactgcatgtggctttgtaagtttttgttgttgtttttgatacagggtcttgctctgtcgtccaggctagagtgcagtggcgtgatattggctcactgtatcctccacctcccaggctcaagtgattctcctgcttcagcgtcctgagtagctgtgaccataggcatgagccagcatgcccagctaatttttgtattttttgtaaagacggagttttgctattttgcccaggctggtcttgaactcctgagatcaagaggtctgcccccctcagcctcccaaagcgctgggattacaggtgtgagacactgcgcctgacctccactgagtttttaaattttttgtagagatgggggtctctctctgttgctcaggctggtctcgaactcctggcctcaagtgatcctcctgcctcggcctcccaaaatgctgggattacaggcatgagccatcatgcctggcctggcgctttacttttgaccatgtgacacacctgtggttggggtctggggcctcagaggcagcgactgtgctgtgcattggtgaaggaagcatcctcacctttccaggaggttgcccatatgacaggttaggtgttgttcctgcttgaaaaacaaacttgagctgggtgtggtggcttgtgcctgtaatcccagcactttgggaggctgaggcaggatgattacttgaagctaggagtttgagaccatcctgggcaacatagtgagatcccatctctacaaaaaataaaaaaggtgtggtgcagtcattgacacctataatcccagcccttttggaggccaaagtaggaggattgcttgaggccaagagttcaagactagcctgtgcaacaataaaaaaaaaaaaaaaacccaaacttgagaaaacttgccataagaatagaataactggaggttttatttcttggcattaagtgaacaaaacccagccactgaccgtaaaggtaatacaattagttgaaatattgcagtgtggggaggctatttgggtggcaatttgttggggacaaggctggctgtcattagaaccttctgtgtgcattctcctatgatggaggcagtgtcttctgccagatggagccttttgggatcctcccaaatttttttattttgactggtcctggccattcggctgttccctcccctcccctttattagagtcatcccaagaggactctgtgctttgtggtcacaggtcacacaggtgcatgtgcaaaggagatggcctgtttagaggtgaatgaggtgggagcaccagatagttgtttaccccctttccccttactctattcaggagcacttgaccaagccataattagcatgctttgcacatttccaatctgaaatgattggcaaagaaatgcccgctctcttgttccagttgggtacctcaggcggggtcactgggcattttgtttttcacccagcatctgtggactcagccacacaccggcctggcagacagctccccagtgcagcaactcccatgggcccaagggattataggcaggcttggagctcagaacttgacaggggacatagtggttttctttttcttttcttttctttttttttttttagacaaggtctggctctgtcgcccaggctggactgcagtggctcagtgtctgctcactgcatcctccacctcctgggcttaaggcatcttcccatgtcagcctctagcgtagctgggactacaggtgctccgccacgcctggctaatttttgtattttttgtagggatggtgttttgctatgttgtccaggctggtctcgaacttgtaagctcacgcaatccatccacctcggcctcccaaagtgctgggattacaggcatgaaccactgcacctggcccctgcagacatagtggttttctttttaatgatgttaattagtaggggcactatgggtgggttgtctggagtttcccttgtctagagttagatgtgatgggagctcagggctcatacccagccgtgggtccatataagtcttcgtgtgtctagcttgggtgctccaggaagtgtatttgggatgtctctggcttctattccacaaacttagaggagaagtttgtacccaagatgagctagtcatctccattcacacaacaagcattccttggcttatggctgtgagacaaggctagagtccccgggaggtactgttcttctgcagctaagagctgggatcaggccggcagacttgtccatctatgacataatgtgtggccgctgctgttacctcaccattccatgtgtttccagtgctttttaatttaatttttatttttttgagatagaatcttgctcttttgcccaggctggaatacagagatgcgatcttggctcactgcagcctccgcctcctgggttccagtgattcttgtgcctcagcctcccgagtagctgagactacaggcacacacccctacccctggcaaattttttttgtatttttaatggagatggggtttcaccatgttgcacaggcaggtctcgaacttctggccgcaagcgatccacccgcctcaacctcccaaagtgctgggattacaggcgtgagccactgcccccggcctccagtgctttctttatgcggcttatttgagaagcggagggaaggactagttggtagtgaagcatgtcagtggcatggctgagctggggagcagagtttcagaaccatgctttgtttggcaccatgggtataccaggctcatgtgctttttttctgtacacgctttggcatgtgatgtgtgtggctctgccttgaggacattatgctgagtaagagaagtcaggctcaaaaagacacacttatgattgcacctatatgaggttcctagactctcaaattcttaaagacagaaggaagaaggggggttgccaggggttgggggcagagagatgagagtgagtatttaatggggatagagtttcagctggggaagatggtaagttctggagatggatggatgatggttgcacaacagtgtgactgcacctaatgccactgaactgtgaactcaaaatggttaagatgtaaattttgtgtacgttttaccacaataaaaaaatgaacctttctgaattcagaaatattctatacctttatgacaacatgtattctgtcctctcagaattagcttggggacaaagggacaaaggcacacacactcatttcctagcttgtgctaagtactgggggtgggggtggggttaaaaaaatgcacgtggttctagaaggctcttaatgacatcatcttgggatcacaatgttagagtgcggatattctatgggttttcttcagtccctggacaggtggggtcatcctaggacccctgcaatctttaggggatttagggagaaacagtgtccaggaacatctgaggtctctgttcccgtgcattgcttggggattgaaggtatttctttctttctttctttttttctttttagatggagtcttattctgtcgccaggctggagtgcagtggtatgatcttggctcactgcagcctccgcctcccaggttcaagcgattctcctgcctcagcctgctgagtagctgcgactacaggcgtgcgtcaccacacccagctaatttttgtatttttaatagggacatttttagtatttttagggttttaccatgttggccaggatggactcgatctcctgacctcatgatccacctgcctcagcctctcaaagtgctgggactacaggtgtgagccaccgtacccagcctcgaaggtattttttattttcctatatctgtttgtcagtgagtttcctttaatacagcagtgtgttggtatttttattttatttttatttcgagaccagttcctagatcctcagtattagagaagtcatttcctcttttgttcttgtgacattttcttctggtgtcctttaatactgcaatacatcaggcatctgaaatactaaacacttaaatgtttcagacacttcctaaggcctcagtgtcatctgcacgtagacatttggtttctgggcacttaagatctggggtcgataggcagtttaggactgctgcatgcactgcccaggcagctgctgggagcctgggtggaaacaataagaggagcatccagatagaggtagcaatgttttgaggaacaacattaatcataataataaaagaaagaagtagttgcttctgtttgagaagctgcctggtgccagggcctgtcactgggttctcaggatggtctggaggcctgaggtaggttccacgcaggcaggcaggctccccgggagggcattgggcccactgtttaactgccaggtgagccaggctgggcagaatgtgctaggaggaagctcgtgagcatttgggatggtttggagggaggcctggagtgccagggagcgagaggggtgtggtgctggagtctgagcttaccagagggcagggctctggacccgcatgagaactgtgaatggggttttagggtgggacacagcctctgccataagaaaggatacggggagtgcagagtgtgggcaccactgacactggggcaactctcaattctcagtggtggcctgagggaagcccttcagacacagggtccccacagctccccaaatagcatgccaggggtggggcaggagggggacattggccgcgccccgaagctctggactcaccccaggggctgtgccgtgcccatggctgtagtcttgcctatctccatgtggcttcttcctggcactgattaactattttaattaaagacagcatttgtatgtttttttttttttttttgcctccagccggtggtagaaacctcttggttgggtcctgacaactcgtggaggtccccattttgtagtctcctcctccgtgcccacgtgggtgttagatgaggtgatgcgcaagcgccttgtgtccatggagcatggagcctttgggaagtgggatgctcgatttcaagtagcaagtttcagcaaaaagttccagcatcgtggtccatggtgaggggctgggggggagagcttgcctgagtaacaggtgcttgaacccaaaggatgggtgggagctaggaggggctctcctggccatgggaacggtgcgtgcaaaggtctggcacggggagtaggcaggcgtgctgggtctgaggaattgaaaggaggccaggtggttggagcgggagcatggaacgtgtatgctccttcacatgcacgtagcgcacttgcggctgaagtgggccgggccttgaaggccgtggtgaggtgctctgacgctgggtggacctgggaaattaaggagggccgtctggtttattatggggagtagaagatggtggaagtggaagacagccagtacatgccttaggctgccggcctgcccctgcctgtctcctccttcaaggaggctgtggttcccatggctgagggaggagacaggcaggggcagaccaggggcctacaacatgtactggctgtcaccctaatgggaagctcagtttgagagcagaggtgggaactccggcctccagtgccagctctggttgccaaggatgggcttgtgtggccaacctcacgattgggtcttggtcctcccggggctgattctccgcatctctagtctgccaagtcatactcttccccacagagggttgatggggctctgtgccttggggagagcggggactgctcagggaccgacctgaacacctcctcaatgtgcctctcccctgacttcttggcggcagcttgctgctgtggctagggctacctctgtctttttactgagtagctcattgggcagtttcctcctgatcccccttcaaatctcagtattgggatttgggccttatggtctctgttgttaaaggtggaaacagccatagacagtgtgttcttgagtactgacatggctgtttcccagaaatacattatttactaaggtggcaggcagtagtgtgctgaccccagactggaaaactggatctgtggcccctgctaattcttctccagccagccagccagcgcatggtagaccagcctgacttctgggcttcctcaggatgatctgctgttgccttgcttcagttttttctttccagattgagctggggacttccccacattgaaagtttgatgggaccattagcaaagagggtctgggtgaccctgtgaagggggcattcagtttgtgcaggacctaggagaggggcgggagaaggtgaacggtgttgttgggtttcaccttggatgttgttggccatgtcatgttcccaggattggactggagccaagctgtgtttggatgcagaactagttgaaaaattctagagacagcacaagtttttggtgactacagatggtgataggtcagtgggtctgggcccagggaagggacaacggggcttcctaggggcacctggtagagcccatgcttccggatcaggtgctgacagctgcagagacaccatcactgtaccagccatgggtgccgcaaccccagcaaccccatggaaccggagttccccaggtagtggccagtgtcaggccatgtgtcctttcctcaaattaaaaggacctcgctagcctgagcttgagaggataaaatggcaagaaaggacttctgttgcccaaagtgcagtgacttgatttcatgtaaattgccatagctaccttctcaccaaggctgatcttccctcagtttgagaagtccttgtgtttgggtgggttgtatggtaggggtgtgtgtgtgtgtgtgtgtgtgtgtgtgtgtgtgtgtgtgtagtacccaggtgcaaggtcaaagccaaaccataatgatttatcaagggagcggaagagtctcttatgagctggtaattgtgcacttaagggttacttgatactgctttaaatgtatgggttggagataaaaacagtaaaagctctctgaactcagccagtacggggtggatggcaaaacagtccaaatgatagattagtggaaagcgattacagtgtattttcaagaaatgctgctagttgtgatcatgctgagtggtcttctgcttggtttcctcctctgtgaatcttgcactgattgtattgcagggctcctgcagtgggctcctcagatcggccccttctccttcagggttaaactatccctgctcgtccattcaataaatatttattaagcggctgggcgcggtggctcacacctgtaatcccagcacttcgggaggctgaggcaggtggaacacaacgtaaggagttcaagaccagtgtggccagtatggtgaaaccccgtctctaataaaaatataaaaattagctgggcgtggtggtgcgtgcctgtagtcccagctgctcgggaggctgaggcaggagaattgtttgaacccaggaggcagaggttgcagtgagccgagatcgcaccactgcactccagcctgagcaacagaccaagacttggtctcaaaaaaaaaaaaaaaaaaatttactaagcaccacttatgtgtcagacactgttgtaggtgcttgaactaaaatcgggcatcaggcagatacccctgcccttgtggtgtgtacgttattgctgggtgagaaagttcatcggcaacacagtagctgtgttgtgtggagtgtgggaggggtggtgctgtggaagaagaggagcagggtcgggatggtgggcctctgtgaggagacatttgagcaaaggcaggggtggtgggggatcacacggaggggttaattttttatttttatttattttgagatggagtttcactcttgttgctgaggctggagcgcaatggtgcgatctcagctcaccacaacctccatctcccgggttcaagtgattctcgtgcctcagcctcccgagcagctgggattacaagcatgtgccaccacggttggctaattttgtatttttaatagggacagggtttcttcatggtgtccaggctggtcttgagctcctgatctcaggtgatctacctgcctccatttcccaaaatgctgggattacagacgtgagccactgtgcttgacagtggtttttgttttgttttgtttttgtttttgtttttgttttttgagatggagttttgctcttgttgcccaggctggagtgcagtggctcaatttcagctcactgcaacctctgcctcccaggttcaagcgattctcctgcctcaccctcccaagtggctgggattacaggcatatgccatcatgcccggctaattttgtatttttagtagagacgaggtttcgccatgttggccaggatggtttcgaacccctgacctcaagtgatccaccccgcctcagcctcccaaagtgctgggattacaggcatgagctaccgtgttcggctgacagtcgttttttaaaggtcgttttcaattcgggatgcagattgaatagttaattgatagatgaaatgacagaactaggattttgtttaaaacataaaaagacctcaaagtggggagggtcctagtgtgttggaggcacggccaggaggccagtatggctggaacagagtgagcaggctgaagtggggatgggatgcttgggtctgcaggcagtgtgtgggcctctggggttaggagaggatgggcttcactctgagtgaactttgagtccacgagtgaaagcagagaatatagtttggagacctccatcccagtagaggacagtgtggccagtggaggtgtgaggagtggttgggctccagatatatttaatggcagaaccaacaggctttcctgagtgactgggtggtgggtggagtctgcccaaggggacaactccaaattttaattgctgggagaatggatttgccacaagctggctttgaaagcagtggtagagtgtgaaagaagttaccttaagacttcttgccagttgcactgtaggtacgatgtactgtttgttgtgatttgactttcctccaccacccccctgccccaggaagatgtgatcttgtgcatcttgtgttcacgcagagtagggtagttggatctttgtcaagtctcagtgatccacatgcgtgcatctattttgtcagtctgcttgtctttgtatccatgtcatactgtcttgatgtagctttatgttaagtctcaaaatcagttgtggtaagtcctccaaatttgtgcctgtttttccatgttgttttcgttattctaggtccgttgcacttccgtgtagattttggaatcagtttgtcatttcttcaaaccatctgctgggaatttttgattgagattgcattgaatctgtagatcagtttgggagagaattgataccttctgacccatgaacaagacacatgtcttcatatacttcagttttctttttttttgttttgagataaaacagtattttacacaagtgaggctattgtgattgattcatgcaaacaacaactttagaaacatcttttaaacatgttcagagagtgtataacatacaacagaaattgatgaaaagtgtaacactaaaataaaattattctcatttattactgcaaggagtacctccccataccccccctttttttgagacaaggtcttgctctgttgcccaggcaggaatgcagtggcacagtcacggctcactgcagcctcctgggctcaggtgatcctcccacctcaacctgagaagtagctgggacctcaggtgcacgccaccacacccagctaattttcaaaaattttttttgtagagatggggttttgccatattggccaggctggccttgaactcctgagctcaattgatctgcctgccatggcctcccaaagtgctgtaattagaggcatgagccactgtgcccggccttctttcatttttcttgttgtttcattgtagtttctttatccttaagtatttcaccttttttgtgctaatgtagatgacttttttcaggttttgagttctgattggtttgtgcctgtgtgtagaaacacagctgattttttatatatagaccttgatcctgcagcagaacagcacaggacacctgcttctgaggcttcccaccctcggggcagagaggtcttggattggcagatacaaaatagttaggactaatgctgcccattgggtttctcagcttgaatggggctaaaaagagcggcagaaagggttcttcctgaggagctagccctgtgcctcatttaggaggtgcctaaaggtctttccatagagttcactggtgttgtcccctatccttatttttgcaagttctcctgtgggagtgtttctcgccatccatcagctgtgaattgccgtgaacctagtttaaaaataaaggtttcatatcagagcaagctcctggtagtcctgtgggtgcaaagaatgacaacagaggtgatgttgacactatttggcaagctacaactgacagaactgcttgggaatctgggatttggctggttcctaaggttcagcctctggcccatagccctggacgtctgatgatacaaaccggaagtggaagtccgaggcattttctctatgaccttggaagagaagttcctgaatattgtagagcattagttttcctgtctgtaagacaggcagcctctttctctctggacagcatcccatggggatgaccatgacctttggttttggaggtgaagccctctcggtctggagggtgaagtccgctcattcccaggcacatcatgccctcatcttgagggtaaacctagcactgccttcaccaggaatggtggctggtttccctggggtccatgacagacaacatgatggtgaggaggttacattgggagaatgagccctgcgtgctgcctgtgtgctctgtgaccctgggcaagttcctgaagatcagacacatcagatcccttatctgtaaaatgggcatgatccaggaacctgcctctacggttgccttggggattcagagatgctgtgtgagcatagtacctggaacatactcctaagtacctattaaatgctaggtttctgggttgttttttgagacagggtctcactctgtcgcccaggttggagtgcagtggtgtgggatcttggctcactgcagccttaacctccctggcttaggtgatactcccacctcagcctcccaagtagatgggaccacaggcacacgccaccacacctggctaatttttgtatttttttgtagagacagagtttcaccatgttgcccgggcttgtctcaaactgctaggctcaagcagtcctcctgccttggcctcccaaagtgttgggactacaggcgtgagccactgtgcctggcctgtttctgtttttaatgtcattactattataataaaaaccctgggctgggcacggtggctcatgcctgtaatcctagcactttgggaggtcgaggtgggtgtatcgcctgaggtcaggagtttgagaccagcctggccaacatggcaaaaccccgtctctactaaaaatacaaaaatcagccgggcatagtggtgggtgcctgtagtcccagctactcgagaggctgaggcaggagaatcgtgtgaacccaggggtcagaggttgcagtgagccgagatcgtgccacttcactccagtctgggcataagataaaaataattgtatttcatcgtgtgactgctttttatgtcaccatctgtattggtgaagacagtgtctgggacgttggcgttcattggttagcactgtattgtttcatacctcagagatcagtagaaatttgtttcctccgactgtccccattgtggaaggtagctgaggcaaaactcaggaaatctgaaattttgctatgtaattccaggggttagagacattttagaaatgccagtatgttccagaaaccttgcttggaaacacagtgtttctttctctgtcctttgctttaggttggtcagcacattgtctcaagtagccttttgatgtcactgtggccatggccaactggtaggaccagcaccccataccccgaagccaggtgagtgcttggggtgtagtgtctgtggaaggaaggttccacgcatccagcaggcttcggtcagcttcttggacactttaaagtgagtgctgcttcagccacctcctagagaagatggagggaggcaggccccctgggatcgcacactgtgcagtctgtatggggctgcctggcccgtcccttcaggcctcagggaaaaagaaaccattctgattggtcattcatttgaaaaccctaggtctaaataagatgagcctgtcctctctgaggggcaggggcagaggataatcctggccagtggcctttgccctctggccattcccatgatttcccagcagtgatagatgccgttagactttttccttattcaccgcaaagcccagggccccacactggttcttggagctggttgcccttaccttgcctcgtgcctcatggcaaagctaagctgcccccgctgcgtggagctcttaggcagagactgtcaagagctgtaccagggcattgctgggtaccttggattttctctgttaccatcaagcctggtcagcgacgttttggcccaaggctacctacctggagaagaacgcagaactgaaagatgtcttagaacttggaggcagcccctgggtcagctgctccgttttatagatggggacacacatgggccagagttggcaggtgacttgcctagggattcatgccccatcgaacaggatcttgccggtcacgcagtgtgagatgtggctgctctgctgaccatggcacagaacaagtgttgcggtcagttttgtgaggtttcagctcttcatatggcaagaaaatatgggcatagtcaggtaattctgttgtcaggaaaacatttccagaatgttctccaaacaaaatgaaactttcgtggtacttatatttttattttttatgttttgagacagggtctcactctgtcacccaggctggagtgtaatggcatgatcatagctcactgcagcctcaaactcctgggctcaagcgatcctccccgcctcaggctcctgaatagctgggaatacaggcgtgtgcaaccacacccagctaatttttgtattttttgtagagacggagtttgctgtgttgcccaagctggtcttgaactcttgggctcaagcgattctcctgctttggcctcccaaagtgttgggcatacaggcaaattacactcaaaaaaattttttgagatataatttgcataccatacaattcacccatttgaagtgtgcaattcagttttttatatatattcaagagttccacaattaccacctttatttaattccagaacattttcattatcccaaaaggaaacagcatactcattagcagtcactcctcatctccccctcccctttctactgatgacctctaatctactttctgttgatttgcctgttgtggacatttattgtaaatggactcttatacttgtgtaagtggccttttgcgtctgccttctgttagcgtggttcatccacattgtaagcatgaatcagtgcttctttcctttttatggctgaatgatattccattatatggatgaaccacattttgtttatccattcattcattgatggacatttgagttgtttctacttttttagttattgtgaatagtgctgcttttaacattcgtgtacaagcttttgtttgaatgcctgtgttgcgttcttcttagtatatacttaggggtgcagttactggatcatatggtaactttctgttaatctcttttcaggaattaccagactgttatccatggcgcctgcactattttacattccctgacacttacacagggctctcaaactctttggagacaagttcagactcaaagtctgtgccagtttcctacagagagttgagacttgtcagagcctattacctggtgctgttgtgctgtaactactatttgggggatgtcaggcattgacagaaacagagggtaggactagggactcagagtcacaaagccacatggctctcatcatgttggctcacctcctttttggagataggctctcgctctgtcacccaggctggagtgcagtggtgtgttcatggctcactgcagcctcaacatcctgggctcaagtgatctacctcagtctcccaaatagctgggactgccaggtgtgggccactgtgcccagcttgagctcaccccctttgttgagggggaagcacccacagccagcccagggaagtgagtgactgcctcttgtcctgcagcccagggcattgtttgagggcagcagggctggctgtagtttctcctaggccccaggctgggtacccacccctctgcctggccctttcttaactcagaagcacatggtctgagcagtaggtacttgttcaatgaataaatgaatggaggaaacctccctcttctctgttgccagccagcagggaagacccagccatagcattcaggcagtcagtttgggagttcagaagggaatttccagaggccaccccaggttttcctttggcctgtgcttgaagggacttgatagaaaaggacagtctataaacagtcgtggcacatgatacttagtggtcaaataggcggaagccacccccgaataattatttcttcaggacttataaatgtgtcagcttgtgtgcactttttgttgtgggtgtgtaagacagcccagcatattgatagattttaggttttctccacaaaatgcaagtttcacccactcttgggtgtgtctcactcagcactagcccacacttgctttaagtggaaattatggactgtgattggctggggtgtccccattcctgtcacccaggaccacatgagcacagtggagggagcagggccggaggagggctggccctcaatgtgcccagcagctccctcccatgtctgaggcacacagtctacacacaactcccacttgtgtgtacatttattcttatgggcacaggggcagtcttgcctgttcatggacttggtgtctgcccttgaatttggcctgtcaggtcctctttgttaagcaggcacgcactgcctagtgctgggtgttaaggatcaaaaaatgggtgtgactgtagaaaaacagattgcatcacaggacaggtaatgcacatgggcctggaccaaggtgtgaatgatgctcagtctttctaatataagaatcctgcacgttggagcaccaccaagacatttctgggttggcaagcacatggagtagacactgttctagtgatgggagtcaggtagtgccgtggtagttgcttttggaattcacaacttctctcaggggtatttgcaacatctagcaaaaggacaagtggtcaggtgcggtggctcactcctgtaatcccagcactttgggaggctgaagcgggtgggtcatttgaggttaggagttcgagaccagcatggccaacatggtgaaaccccatctttactaaaagtacaaaattagctgggtgtggtgatgcacgcttgtaatcacagttacccggggaggctgaggcaggagaatcgcttgaacccaggaggcggaggttgcagtgagccaagatcacgccactgcactccagcatgggtgacaaagtgagaccgtatctcaaaaaacaaacaaacaaaaaacacaaaaaagcaaaaagacatgtgtttactctttgctccagcaaatccacttctggaaatgtatccgaaacatggtcagaaataaggaaggattacaaggattgtgttcattacaacactccggaaacaaacaaagctgggaatgacttagatgtgtcagtgttcagactgggcaacttgtggtggtggctctgcctacagggtggtgcctgagcccctgagtgaagggaggaaggagtaggtgatgtcttcatttgtggtggtgatgggatttctagttgaaatgacaagcagaaaaaagaacaatgtaaaggaagaagagatggagtgtgctgtcacttatctaaggaaaggtggggggatttgctcattttatttttatttttatttattttttatttttatttatttattttttttgagatggagtcttgctctgtcgcccaggctggagtggagtggcgcgatctcagctcattgcaatctccgcctaccaggttcatgccattcttctgcctcagcctcccgagtagctgggactacaggcgcccgccaccacgccctgctaattttttatatttttagtagagatggggtttcaccatggtctcgatctcctcacctcgtggtctgcccaccttggcctcccaaagtgctgggataacaagtgtgagccaccgtgcccagccactcattttatttttatacaccataaaggaaccacattgtcacctccaggagaagggatggagagggcactgggagactttttcacgtgtcctttctttgtagcatcatgtacgtgcttcacataattataaaacaaaagccaagtggtggcagtggaaggggaagcaatcccttaaaaaccaaagacaaaaatgaatgaatctaggtacatgtcagttgtaacacacattggtgacttaacctctcagaacttatttctgataactttaaaacgtagtttgactgtaaatgttttagcgagatacccaataaaggtaaacaaatttatttccttctttccttcccttcctttccttccttccctttccttccttttcttccttccctttccttccttttcttccttccctttccttcctttccttcctttccttcccttccttcccttccttcccttccttcccttccttcccttccttctttccttcccttccttccgttccttccctcccctcactctgtcacccaggctggagtgcagtggtgcgatctcggctcactgcaacctccgccttcacgtttcaagtgattctcctgcttcagcctcccgagtagttgggattacaggcgcccgccaccatgcccggctaaaaacaactttcttaaaatcttcagctgttttttggaatcctggttttggtttcagggtaacaatattagcattattcctgttatatattgtaggagaaaataagtaagtaatgtcattaagaaccaaaattttccacacaaaaggaaaatgcaataaaaacccaaagcactagcttttttatttttatttttatttttgggcagggtcttgctctgccacctaggctggagtgcagtggtgtgatcatagctcactgcagcctccagcagtccttccacctcagcctcccaagtagctgggacaacagatgcaccaccatgtccagcaaatttttaaatttgggtttgtttttgtttttgtttttgttttaagacggagtctcgctttgtcacctaggctgaagtgcagtggcgtgatttcggctccttgcaagctccgcctcccaggttcatgccattctcctgcctcagcctccccaacagtagctgggactacaggcgcctgccacaacgcccggctaattttttgtatttttagtagagacggggtttcaccgtgttagccaggatggtctctatctcctgacctcgtgatccacccgccttggcctcccaaagtgctgggattacaggcgtgagccaccgtgcctggcctggtttttgttttttgagacagagtttcactcttgttgcgcaggctggagtgcaatggcacgatctcggctcaccacaacctttgcctcctgggttcaagtgattcttctgcctcagcctcctgagtggctgggattacaggcaagcatcaccatgcctggctaattttgtatttttagtagagatggagtttctccatgttggtcaggctggtctcaaactccaacctcaggtgatcctccagcctcagcctcccaaagtgctgggattacaggcgtgagccactgcacctggccaagacctgaagtactttaagtaaaacgcttaattctcattctgcattgggaacatggtaattgtgtaagacacactggggttgtatcagaaggacccacaggggccctgctggcacagatggggcaagcgagagtgaacaagaacaaggagcccctgagttagatgtgttaaaaatccaaggctggctggatgccgtggctcacacctgtaatcccagcacttcgggaggctgaggcaggtggatcatttgaggtcaggagttcaagaccagcctggccaatatggtgaaaccccgtctctactgaaaatataaaaattagctgggtgatagtgacgcacgcctgtaatcccagctactcgagaggctgaggcaggagaattgcttcagcctgggaggcggaaagttgcagtgagccaagatcgcgccactgcactccagtctgggcaacagagtaagactgtgtctcacaaaaagaaaaacccaagggtttaagctggctgtggttatacgcacctgccatcctagctgttccggaggccaaggccataggattgcctgagctcaggagttggagtctagcctgagcaatgtagcaggaccccccaagctgaaaaaaaaaaaaaaaaacccacagtttcttattggtgcttaaaggacaaggaagaagctcactggtcccctttggtaggagttagagagctagctacccatttaaaaatgggtagagggaaagcaacaggcatttttcctgcatcttctctgtgggctgcacactccaggaacgagagtgtgggcgagggcaaggttccctcgcatggcagtgctggcccgcagaactgcctagggtgacagggatgctctacaccgtctgccctgcgtgccgtttaacatagcatgactgaggacacggagtttaattttgtctatttaaatagccacatgtggctaatgggcagcacagctattgatgtgttttagcaaattaatatgaaatgacagaattttaagtttattgcagtcacctagtgaattgaggggttccagactgtaaggtccagacagtgattctccctagctgctagcccccaaggagagtgtcctgtgcttccacagggacacgcactcaccaagcctcaaggtctagttcatgagaaattgggggtatgtgcacttacgccacagggacgccatttgcaaaaccaacaatgggaaacagggcaagcatcctaactctttgagcatacgattgtgtcagtaaggggacctgtggattccagccagatatgactccaacaaagacggaagattgtgaaattatcaaaggtgggatcatagtgttgtggtcatgcttgttctgtagagataaatactgacccctttagcacaaatgcatgtttcataggatttgcttcgtggaagctagtgggagagagaaggagaaaggagcggcatgtggaggacacgagggtggtccccgatggccgtggacctgggtggtaagcacctgcagttaatcacaccattatctactctgtgggtggatttgaaattttccttaaagaaaagtgtgaaaattgggtttggcccaggtcttttctcagggagcttcgtgactggatcatctagaagaggggaaatggccatttataaaagctgaggtagaggccacttgggggtagtttaggagaccacttgggagtagtttaaattcaagcagaaaaccatgagcagagactggaattgccagaggggaccgtggcctgtcagcccaccagacagcctctcttacacactcttattttctgtaattacaacactcacagctactcttcgtggagccctcaggaagtgttagcaataaagtgggtgctgttcccattttacaggtgaggaagctgaggcccttgtgggtgaatcaggctttctggctttgactggacagctaagggcatgagcttctgggcctccttcctgtcgcctccctgctcagtacctggggcacatctgactaccactccagtaccctgactctatgatgaaaaccattctcccctccccattggtattgcccatccacagcagtcgtagcccatcacgagtggataaagtaggtggttagctggacttgcacatgacttgtttcgtgaacagtagtgcttagagttgtgatctagggacccagcgaacagtgtgtgagggacttcaaccctgcctctctccggtatgtgctgtgcctgctgtgccccccactccagtgttctccttggggctcctgaggcagctcccagtaggaggcctatcgttgttggcaccccaagggtgtccctgatccctaagtagaaacttaagcaggtatttggacaaataaatgagtgaaacaccttgtgacgttgaggcctgtggcacttccccaatagtgtgttagtgtaaaaccaccgtgtatgatgcctgttggtcccagcactttgggaggccaaggcatgtggatctcttgggcccaggaatttgagaccaccctaggcaacatggcgagacctcgtctctacaaaaagtacaaaaattagccaggtgtggtggtgcgtgcctttagtcccagctactcaggaagttgaggtgggaggattgcttgagccctggaggttgaggctgcagtgagtcatgattgtggctctgcactccagcctggacaacagagtgagacctcgtcccttaaaaaaaaaaaaaaaaaagccaccatggcagttttgttttatttggattttaggcagtgtagggcctgtgataaggcctggctgaggtggggctctgctggtagtaactcttgtgattccagccctctgaggccacttcctctttctgccttggctcctccttggtgaattctcccttatgtgtcccacattctcatactcccaggcattggatctttagctgggagatggttctgagttcccatgtgtacagtgggcttgctgcagcctcctgcagttgtcctgtaggactcgtggttggtggtgacatagaggctgcctaccctgatggctgatggctgatggcagtgtggttgtttggggtcttgttgtataaaaggagcatgtttactgaaggacccagttctgtgctgttggggtcacagcaaacctgcttttgcctgttagtattttagtagctctagaggggttcatggctattggaattagtatttttgtttttgttttcttttctcacctctttaaaaaagcatgtaaaattcacatggtagaatattcaccagttttaacgtttttaaagtgtgttgtttagtggcatttaacccattcacagtattgtgcaaccatcacctgtaattctagaacattttcatcacccccaccccaaaagaaaccttgtccccattagcagtcactgccttttccttgactctgctctccaccctcccagcagccacttattctactttctgtctctgggtttgcctcttctggcatttcatataaatgggatcatgcaatatgtggcctttttgtctgactttttttcacttagcatgatgttttcaaagttcagtcacattgtgtcagagtttcattcctttttatggccaaataatattccattgtctagatggaccacattttgtttatccattcatccattgatggacatttgggttgttttctgctttttggctattgtggataatgttgcttttaacattcacctgcacatttttttttgaatacctatattcagctctcttggatatacctacaagtggacttgcaggacactcgggagcatggtgatgccgtgggctggaggccctgcccaggctcatgtgggaactctgcgtttaactttttgaggaactggcagaccgttttccacatcactctactgttttactttccactgttttccacgtcactctaccgttttactttccaccgttttccatgtcactcttaccattttactttgcactatgcagtgtatgagggtcccaatttctctacatccttaccaatacttaattggcttttttgattgtagccatcctagtgggtgtgaagcggtttctcatggtggttttgatttgcatttccctcatgactaatgacactgagacagagtctttttcacatgctcattggtgattcgtctctcttctttggagaaatgtctgttcaagtcttttggctgttttttaattgggttgcttgtctttttgttgctgagttgtaaggatccttcatatgttctggacactagacccttatcaggtgtatgatttgctataattttttcccattctatgggtgtttttttttttattctataatgccctttgcacaaaagattttaattttgatgcagtccaaattatcttttttctttttttgatattgtgcttatatgtaagactgtttgccaaacaccaagtcatgacatttttctcctgtgttttttcttctaagagttttatggatttagctcctaatacttgggtctttcatccattttgagttaattttcatatatggggtgatgtaaagattttgttttgtttttatttttttgtagagacagtctcactatgttgcccaggccgatctcaaactcttggcctcaagcgatcctccctcctcggtcttccaaagtgttgggattacaggcgtgggccactgcatagtgcctggccaggttttgtttggttttgatcattatcttttctgtcaggatgaagacattttggcattaaccgggaaggaggttgaagggcagtggtagttgggagttctgaaagtactatttcaaatctgtttaacaaatgcgtatacattgcttcttctgtgcaaagcattgtgcctgcatgggcccttggatggtagtgctagagaaataggtgtcccttgatatcctgggggtggaagcccacaaacagagaggtgaataaatagcatgtcaagtggtgatgaggcaggaaaggggatagagaccccctggggggcatgtgtggaggggaagcgtttctcactttgcattatcagctgagacctgggggagtggagatgcaaaggccctgaggtgggagtgagccaggatgtcagtgtggctccagctgagagaacaggagaggggttggttggacttgggggacgggcacaggggtggctggattatggtcaggccagcaggaccttctggccagggctttgcttccgtattattaagtatcatgttttaccaaagaagcactgatacagaccccccactcccccacttcatggcacagctgagcttagctgttgcccagaggttggtgtgggtgtctatacacagactcctcccacccctgaggggaagagttccatttgcaaggtagagggtagaagtaggatttctgtcccagcccttacagctgtgcaggaacctgctgcaaggattgtttgtgggtagacccacgggctggggctgcgttgagagcagatagtttgtttcatcatagaagtaggtttccctgctggctgtgatcctccctgtggctctgtgatgctgcaggatgcttgtagggaggagcttgaggaagggcgcctgggcagggcctccagcccacagcgtcaccacgttgctgggtgccctgatgaaaatggcaacagatgaatttttggttccctcactttccacttgacatttccttccaggaactgagaaggcttttctggcccttggaattttctgtgccagacctccctgccgtttccagtctcaggccttgatggagctggtggtcagggccacagcttcgcctggctcagccctgagagactacagccctggaagggttaaggcctcccattttgtgatgtgacgcctgatgggcacgtagcagatggcatggaaatggcaggcgtaacccttcgtaggccacgtaggctcacggtccaggaggcatctgggaggggacagagagccaggcccttcccacagaaggggagcatggccagccctcacagtgacgtcctacagctgggactctggtccccatttacctgtggaggtttaagactgcccggactcccccttcacaggcggcacctttgtttctatgtcgtgtgttccttgggcagcgtctgtttctctctctggggccgcagggttgggcttgggcacaggccctggccaacagcggcgcaggtgtggggccacttcaagcacggcctcaaatgagggcagtgttgggcactgaacagttctgagatgtcacacacagaaaccaagtcctgatctccagtgtgagcacagggagctattggtagttgtgttgtgttgtgttgtgtttttgagacggagtctctctctgtctcccaggctggagtgcagtggcacaatctcggcccactgcaacctccgcctgccgggttcaagcaattctcctgcctcagctttctgggtacctgggattacaggcgcccaccaccatgctggctaatttttaaattttttttgtagagatggggtttcaccacgttggccaggctggtcttgaagtcctgatctcaaatgatccgcccgcctcagcctcctaaagtgcaccgcccctggcctagcagtagttttaaagacacttatttgctacctgtctttctcctcataataagcctgtgatcagtttaggtgtgctttttcctattgtctggtacaacttgggggtgaagacaggctttcatctcgtgttacccggaagggccctcaagctgagacacagggccgatatacagaagcagctaattgtgatccttgtggggctctttcatggccagtgtgtggacactatcgtcccctggttttgggagttttcaggcaatcatctgtgtctctggaagatggcataatccctacaccatcttccctgattaagaactatgcttctccagtttttttcccccagatgacaccagagagggagtttggggtctggggacctgtctgtcccaggctggccctgcacaatagcgtggtgagtctgagtggtgggcacaccatgggagggctgttggctattgggatcagtgatctattttctagagacaacttatgcccaaaacagctttgctctgcacagggtgctggagtgagaggctaccagagctgctctccactgtgcaggcctagtgtgagttacattaggaatttgcagaccatctagatgttatttatttttagagacagggtccaggcggtttcaaactcctgggctcaagcactcctcctgctttggcctccctagtagctggaactacatgcacacatgccacgagacctggaaggttttatttttaaaacgttgatggttacttgggtatatattaatatacctgggtatgtttctgtgatgttttgctctccaggtttactttgttaaatgtatcaaaaaaaaaaaaaaaaaatccagcctgggcaacatggttgaaactctgtctctacaaaaattagcccagtatggtggtgcccacctgtgacctcgggaggctaaggtgggaggattgcttcagcccaggaggtcgaagctacagtaagctgtagtcatgccactgcactccatcctgagcaagagagtgagatcctgtctaaaaaacttaataaattgattttaaaaaatattttggaggcatcatttacaagtcctctacctgaaacacatgagattgtaagtgcatttatttgtaaatgggaaagccagaggtgccttttctttttacttccttcattgttttatttatttatcttatattaaaaggtttttttgtagagtcagggtcttgctatgttgcccaggctggtcttgagctcttgtcctcaagagatcctcttgccttgaccttccaaagtgctgggattaacaggcatgagccactgcacctggtccctttcatttttaattacctgcatttctgagtagctctagaaccaagaactagagatgatgggatggatgtcctggtcgttggtcagattccgcccactgtttggtgatgggaaccagcttatattcgtgggtcattagcatttcagatgaagtgctggcaagggaccctgccattcagcagcacagtgctgggcacacctgggttgtcacatgtgccctgttaggaggcggtagatgcccctctccctctgtcagagctgagcatggcacttgtaaatagcgtcttcctggaagtgctgggtagggaacacctgtgggggctgttgctcaccccctcttcagggaacgctggtgctcatatttatgtatttggtggcctgaggggaggtactacttcacttgaattggatgtgtgctgctcatgtctttttggagtgtgttctgtgccttttgacagctttcagctttctcctcctcttcaggacctgttaaaggtttcagccctcctctcacaggctagggggcggtcaggatccccgtaccacaaggtgctggggggtatgtgggggctttttcttcatcgtgttcaggtgaatacaagtgtggcctctgtactgggatgctttctttcaccaagcaacctcattacattaaaaaaaaaaaaaaaaaaactctttttttttgtttgttttgtttgagacggagttttgctcttgtctcccaggctggagtacagtggcatgatctcggctcactacaacctccgcctcccggtttcaagcaattcccctgcctcagcctcccgagtagctgggattacaggcgcccgccactatgcccagctaattttttgtatttttagtagagacggggtttcaccatgttggccaggctggtcttgaacttctgaccatgtgatccgcctgcctcagcctcccaaaatgctgatattataggcgtgagccaccgcacccggccgagattcaaacttttaaaaagtggggtgggcgtggtggcttactcctgtaatcccagcaccttgtgagtctgaggcagccggatcatgagatcaggagattgagaccatcctggccaacacggtgaaaccccctctctagtaaaatacaaaaaaaaaaaaaattagccgtttgtggtggtgcgtgcctgtaatcccagctacttgggaggctgaggcaggggaatcacttgaacccaggaggcggatattgcagtgagccgagatcacgccactgcactccagctggatgacagccaggtgggctgtgaattagaaggggtgtcccaggcactgatcaggctcctcgtgctgcagaagtttccttctgagttcacgcattgtccagatgtgcagcagtcaacaaatcagttattgtggcttctctggaagctgacattaccatgtttttggcacgaagtagaaccaacacgcaaggttgcagtgccagtgagttgaggacgttctgtggctctatccagctaggtgagaaattgcagggctgaggaagtagtgtgggttgaagtgaagtaggcgggtgggaatgcgtgtgagactcagcagggctctgggctccttcacatgctctacaacttggtgattccggcccttgtgtctgaaaaccatactttgtggttttccatattcttgagacaagtagatcagtagctgtgtggacgctgattgctcttgagaactactgttcttttgttcagaattaaatgcagaagaaagactttttttcttcttacttttagagacagggtcttgcccctttgcccaggctgcagtgcagtggtgcgatcattgcagccttgaacccatggactcaagtgagcctccctccttggcctcccaaagtgctgggattataggcgtgagccactgctcctggccagaaagatgttttctgagacaattgagcaagactcagaagtaggaggaggggatgaaaactgtgcatgcgtatgagtgtgagtatatacgtgtgtgttgttcaggattgctctgtgtttaactagtgtatactttgcaggggaaggaggtgtctgtctgctgtcccactgtttcctttgtctgtcttctgcctttcctacagggtcagatgctcttacttcatgggcgccatgtgttccttgtccccttcccagtcttcttgttgcccttggcttccctggatcccacagcccaggtggggccaaggagtccctgctcaggcactgagagccttgctgtggctgtcagaggttgatggggagactgcccatcttgtgggaagcctttgtaacagtgacttggcaccttcaacaggacggaagaatgtgttagttccgtctcctgtttttgtaaaatggttgtccacctgttgaactgcatcagcctctcaaccaggcagaaggcttagagaatccatgtcagcccccaagtccagggagccccagtgtgagctggacaggacatagattgcccccaggcctgggggggtgaagtgacgtgcagaattgaaggaccaaggcagggagtggcagtaggcaggacaggtcctggtggttctgctgaatccctgggctggggctgggctgaggagctaaagccacaggcaaaatgtaccacacgcagacctttagccacccacagtaactttgttttcggaccttgattcattctgtgggacaggacatgatataggttacctgcctgtccagatcctgccccagagtgggacagtcgtgtatggcagagcattagctgggagaggtcacactagctgggtgtggaccttgtcctcctgtgcgtcccctcaaaaccaggtaatgtgtcctcaggatttccctggcacaaacgacctcgctctccctcagtcctcaaaggtgatggccagtcctggttacccgggaagcccgtgccctgtgactcccttcctgccactgggcatccctgtagcccccattcctccagcaatcagcctcagtggtgtgtttggttcacaccttgtgcttgcactgtgactgaaacctcccctcctcagcgaggcttctcctgggcccccaggctgggcttatgcccctcaggtccttctcagccctgtgcttttccttagggctttggtgtgattctcgggcacctgtgcttagggagtgcttgtttctgtaactgggttaaagtttcatccactgcagcaattgagtttatagcatgtaatttccttctaccagggacctatttatcttgagtgttctaagtgtgggcttttgggacagtataaaattgaccctgtagcaagctgtcttgtctgcacatagcactttttgaaactaaatttccttctgacttgtcaaaagagttaaccttgagtccttgctctggatttaatttacacgttcgagtctgtccgctgtgccccccacatacaaggtcttgctccgttgcccaggctggagtgtagtggcacaatcacagctcactgcagccttgacctcctggattcaagcagtccttccacctcagcttcctgcgtagctgagaccacaggcgtgtaccaccacaactggctattttttaatttttttaaaattttttttttttttgagacggagtcttgctccgtcgcccaggctggagcgcagtggagcaatctcagctcactgcaacctccacctcctgggttcaagcagttctcccgagtagctgggattacaggtgcccgccaccacacctggctaatttttgtatttttagtagagatggggtttcaccatcttggccaggctggtctcgagctcctggcctcgtgatccacccgtcttggcctcccaaagtgttgggattacaggcatgagccaccacacctggccaaattttttgtgtttttttttttttgtttattttttgtttttgttttgcttttgagacagagtttcgttcttgttgcccaggctggagtgcaatggcacaatcttggctcaccgcaacctctacttcctgggttcaagcagttctcctgcctcagcccctggagtagccgggagtataggtatgcgccaccacgcctggctaactttgtatttttagtagagacagggtttctccatgttggtcagctggtcttgaactcccgacctcaggtgatctgcccaccttggcctcccgaagtgctgggattacaggcatgagccaccacacccggcttaaaaaatttttatcagaaggccaggtgcagtggctcactgcctgtaatcccagcactttgggaggccgaggtgggtggatcacctgagctcaggagttcgagaccagcctgggcaacatggtgaaatcccatctgttccaaaaatacaaaaaattagctgggtgtgttggcacccacctgtggtcccagctactcaggaggctgaggtaggaagatcgcttgaacctgggaggcggaggttgcagtgagctgagatggagacattgcccccagcctgggtgacagagtgagaccctgtctcaaaaaaaaaaaaaaatttattggagacgaagtctccctttgttgcccaggctcatcttgaattcctaggctgtagtgatcctccctccttggcctcccaaagagttgggattacaggtgtgagccactgtgcccccccccacccccttaggtttctgtttttgaaacctacttttctctgtagtccattctgctataaggcttattttggaaaagcagatttgttccaacacaattgatgtgttagaggaccgtcgaggtgtaacacaaatgttgcgatggttgcgtgtggttttgttcaggagaaacactaggctagggattggaaaactatggcccacaaggtggtggcctgttttggtaaatagagtttaattcgcagacacgcccattcaggtatgtacagttgggcctccatatccttgtgttttgtgtctttgagttctaccaaccgtggattgaaaatatttggggtaagccaggcatggtggtatgtgcttgtaattctagctacttgggaggctgaggcaggaggatctcttgagcccaggagcttgagaccagcctgggcaatacagtgggaccccatctcttaaaaaaatttttttgggggctgggcacggtgactcacacctgtaatcctagcactttgggaagccgaggcaggtggattgcctgagttcaggagttcgagaccagcctgggcaacacagtgaaaccccgtctctactaaaatacaaaaagttagccaggcgtggtggcatgtgcctgtagtcccacttactcgggaggccgaggcaggagaattgcttgaaccccagaggcagaggttgcagtgagctgagattgtgccgcgccactccactccagcctgggtgacagagcaagactctgggtcttaaaaaaaaaattttttttgaaggaaaataatggaaaaaacaatacaacataaaataatacaaataaaactatagtataacagctgtttatgtagcatttacattttatggagtattataagtaatctagaggtgactcactaaagcatatggaaggatgtacgtaggttgtatgctaatactacaccattttatatctgggattgagcatctgggaattttggcatcccgggagttcctggaaataatcctccaagggtctggagggacagctgtcctgtcagaaccacagagctgagcattcctgacagagactaaatggcccgcagagccaaaattatttactgtgtagcattttaagaaaaagtttactggccaggcgtggtggcttacgcctgtaatcccagcactttgggaggctgaggcaggcggatcacgaggtcaggagatcgagaccatcctggctaacacgatgaaacaccatctctactaaaaatacaaaaacaaaattagccgggcatggtggtgggcgcctgtagtcccagctactcgggaggctgaggcaggagaatggagtgaacacgggaggcagagtttgcagtgagccgagatcgcgccactgcactccagcctgagcgacacagcgagactccatctcaaaaaaaaaaaaaaaaaagagagaaaaagtttgccaactcttgcattaggtgaatctagaaaactgttaccagtttaatatagtagagcacctgtgagtacatgaaataaaactgcccacacctcagacatgctccaagtcccctcggggtcccgcatgttatgggccacaccctatccctttccggggtcagacagcctccctccagcagaaatggcagcccacccatgctcacggcaagcagtaagttttccccgaggtgagggtcagacttgcaacatttgtatatttcttagccactgagcatgtgtgtagctgtgctgcccatatatccacatgtgtcattgcttgggctcctatcttacgtcatagatgaagttttggagtactgtgtccctaacccttatgtccataagccctgtgtttttatcacatgggtttgcatcccgcagtgtttttaggagtgctgcctctgttgcgctacagcagaacttaaccatactttgaaggcaaaggcaaacaccaaaaggtttgctctcattcgtgacagtaaagtcgtaatcacttaatatctcatctggacctcttggtgtgagagggcaaggtcaagcccaaattgtacaggtccagtgctccccatgtcctttggaatcttcaggtctgactctttgagtggttgatggggccttctgatggctgactgggtacttttgtgccttggtttccccacctgcaaaaaggcggctgatgagagtatttaccttacaggtggttgtggggtagatgctcaatcagtgttgggtgttttgcacttaaaaattagaagatccccatgcttctattaattacaaaggagcaacagatttggatgaaaccctgaggatcccagagctgaaagtgagtttgaagtgtccgatccagtccttcaactcagagcactcctatctgtgacacctctgcccacgcatccagtatgtgcagcacacctgctctgtgactgacactcttgcagaagtggggccacttcagggacatggacaaggtgttgtacctgctgtcacagagcctgttatctggtgagtgattgggacattctgagggctcataccttctggctgcaggttcttcccaggggcctcccagagcttcttccatagccccaggcagggcaagtctagattcagtcttgcctggagacatctgaggatggctgttccatcctcctcctcacatgtatgcagctctcctttgagccccacctgtgcctgtcacttcaggtgaaagcagtgtaaacatgattaacaaggccaggctcggtggctcacgcctgtaatcctagcactttgggaggccgaggcgggcggatcacgaggtcaggagatcgagaccatcctggctaacacggtgaaaccctgtctctactaaaaaatacaaaaaattagccgggcgtggtgatgggcgcctgtagtcccagctgctggggaggctgaggcaggagaatggtgtgaacccgggaggcggagcttgcagtgagccgagatcatgccactgcactccagcctgggcaacagactgagactgtgtctcaaaaaaaaaaaaaaagattaacaaaaggccccttgcacactgtggaaggcttatcagagtggccacctagacagaggcatggtagcctgagttcagacctagcctggactttcacccagccagacttcagttgtgcctgtaccttgtgggatgacacatgcccgtctccaactcatgcaggctctcagtgagaggtagttggctccagccagcttgcacctccccactgctggtcttatcctaggaccactgcagggagacgatctctcagtttggggtctttgaaggctcagggagctcctagccagctgactaggctggggtccatcctgataacatgagagagagaagatgtctgtatctctggtgtgtctttacttttcaggccaccaagggttaagaacccagcgtcagccagtgagtagtagacatctgttctccttttgagaaagcctgtagttcaggactcaccacggctttcccttccttggcctgaaaccctccctgctcagctgcttggcgcatgctgttcccctgcctggaacgtctcgcctaattccttttcctgccctggcctcagtctgggagacgccatctcagtccccatgtcttggagttttaaatgaaagcactttacttgtttgctcctctttgccctgtagggcaaccctgggaatcacatgcttcatgagtctaatttacagaaacgtaggcgtaactcagcagtgcataccaagcccatactgtttgctctacactgaaaatgaagatgaatggtgaaaaaaagtttctgccattgagagcttaacattgagttgcagtgagagatgaagctcctgagtggcacggagattgttgccagggctctggtgaggtacgctgtggcctggtggttgtggccactcagggaggcttgtggcctatatagaaggcgggctgtgggaatgagctggggggtttgggttgactgtttagaatttgagagtctctagcatatggcacagaaggtagatgatttaagctgcgtggacatcttcgataaacactggaagaatgggcagtggtatcctctctcggcccactgaagcttctgtgtccatcttgtgtccttagtcctatgcgttggagtattggaggagccagcttccccctctctccagagcttctcaccctagggagcctccttcctcctcgcctggatgaggtactgtctttctttgttagtttctttctttccttttttctttaagaaacatggcctcactatgttgcccagcctggactcatacacctgggctcaagtgatgctcctgccttggtctcctgagtagctgggactacaggcatgtgccactgtgcctggcttcacacttgtgcttttgattctcatccttagcaggtggggctgttgttttatctggttttcttttttaatccttgctttctttgaatacaggactgattcatagtcactgttaaagaattcaagcaatacagaaatgtttactatagtaagtgaaagtttcttaataatctactcttcagagattactaccactgattttggtccagttcctttcagttttgattttagtgaagttactttcagttttttccctatatacaccttttttttttttttaaaccatgtaaatggtactatgctattctgcaacttttctcccacagttctttccatttttcttcacatagcattgtctgtgaagtagggatgggaaaactgaggctcagctcaagcatcacttgagcccaggtgttttgagtccagcctgggcaacatagtgagaccttgttcttaaagaaaaaagtttgggttgactgtttagaatttgagagtctctatctagcatgtggcacagagggtagataatttaagctgcatggacatctttgataaacactgtggaagaaggggcagtggcatcctctcttggcccactgaagcttctgtgtccatcttgtgtccttggtcctgtggttgattgacagacctctcccctggcccatggccagccagcgtgtgtgtgatggagctgagaccaagtctctgttccctgctgtgtctagttgtaggagctgactgcttggaacacctttctgtctctcaagttaagttgtatctctcgtacttggccttaatgaagtttgacattgagaagtccagagctgctgtttccggtgtggcttccttccggaatgagtcctagtcactgttactcagagatgtgcgtcaggaagtggctcgggccacagttctgagcagatggaggtgtctgttctgcatgggaaagaagtatgcttgtcaggcaggctctgccaatgccaaaacttggcccacctattctctccttaccccctcaacaggtccttctgggccacaacaaggtaccctggtttgactcttaggaagtgggagagccactgaagggggtacagatccaggatgtggctttgggagcttcctcgggctatgctgccgggaggagagtagacaggggttctgggtccagaggcccatctgtgctgtgcatcaatctgtgtgaagggcagggccacaggggcgctctggaggtgggcacctgggcgcaggcttgctgcagctgtgtgcctacagggtccttgtgtcttgagtgttgggcgcagctcacagctagcgaggctagcacctggaccccgttgtcatcatctgactcagcactggttgcttcatgggcccttcttccttcctgataggaagaggtgccctgaggtgccctgtgcctcctgaggacagtggctgcccccaggttcagggctctgctcctcagcatctccgtggggctcatcgtgggcctcgcactcagcacatccgaactgtagcccaaccttccttcctcaaatctgctcctccccatctcagaaaagccagccccactggtccagttgctcaggcaaaaacaagtgaaagaaagcaaccccctccggagtgccccaactcccctctgctctgtccccttccccagtgtagctgcaccataggaaccgctcccctgccctgcagtcctccagccaggtgatcctttagagcaagccagattcctcccctccggcctgggccagtgcttcccccagcacatgtctccgctcaggccctgtctccttcagggctggcttccggtgccgcccgttccacccagcccccgtccctctgtgtgctctgactgccccgtgctctgcctcgtgtccccacagcaccgtcaccaacaccctctgtcatttcgctcgttttccagcatgggggtggatggtgttccctctgtcttgttcaccactgagtccccagcccacagtggaggctcggtgagctgctgtcgggtgaggaggcagaaagacgcctaaaatccaccgttaagagcatcagccctgctgctcccgccagtgctttaacccacttactgcgaagcctcactttcttcctgtctgaaataagggtgttactatgggtatgttagtgatgggtgccacagatggcattttatggtagagttagtattagcattgtgatctcaggggtttggttttatgatttgtgtcatgtacttaatttctcttttaattatcaagagatgcgtactggcctggtgtgccagaagtgtgctgggtgccttctgtttgtcccccaagtcctctttaagagttctggttcctgccacagcatcagtcagccttttggaattgttctagaacatgttttctgcctgaggctctcaggccagttggatggtggcattttacgaaaataaagcagcattcctatctgccctaaagcccatggaggtgctcccggtcagagctgcgctgtacctgtgtggggtctctagtgtggctggaacctgtcctttttggcccctagttgaggaagagctgggctacgcccccaccacctgccagcccagtgtgtgcgggacgtatcagaggagaccgatgcccactcagccttgctggtgctgctcatctgtgctggcttgcagtccggcctggggtgtttggagagagtgaggaggagggtgaggctgaccttcaaccttgtgtctcaggcagccctggcagcctcagtgctctcctctttcaaatgggcacactgctgttgggatctgtctgtgcaggcagcagccggcagaggatctcagcccccaggacggggctactctccatgcactggcagctcccgcacaacccttgcctggaacttccgccaccggagctgccttcccctcactctcccctgtcactgggaattttgaaatgaatcctcatttgccagtcagggtgacctagcctcttcacctacttttaggaagtgttctaatgtaccccccactgctctttgcaggagtcatctgtcgcgctttcttcttcctgacaactttgctcctgggtctgtgcttgctgtgcggtggccgccagccctgttgtgctgggggcactagtcccgcttgcttcgaggagggaggagccactccttactggcacctgccctccccaggagcaagtgtcctgtggtggccgaggattggccagtagcaggccctgcgtcattggtcttggcagtggaggaggctcctgccaaaggagccccctgcactcgggggctggccccaccccctccagctgtgcctgtccttcctgaggtgggggaggggtgccgcagggccccgccccgcagtggcctgcctctgggaggcacaggcatagggcaggcgggcgctgtgaggccagccgtcagtgccgggcctgggattggcagagttccaggccttaggcttcatagtgagctgctgtgcaccttgagtacacgccagccagccctctgctgaggaccctgacctgctaccacaacagggggcccaacaagagaggtctctggggctggagggagcagctctgctgggcacctgaggccctgctccatcctgcatctctcagaacctctgggtagcctctggtcctataccagtgagaacgaagtgaggccacacaggcacggcccccctgatctggctgtcagttccaccttgtccatgtgggctggagcagcttcgagaactcattcagggtcttgggttcaaatgggcttcatggaactgagcccagagcttacagggtgggaggctgtgctgggaggggccctgcctggctggaacaggggcagagtggggagcatgggggtttctttgagtcacagggaagggtgctatgtcctggaggtggaggtgcattctccctgtccacctggggacctcatccccaacagtagttataaggccagactgggaagcttcatccgtagagtggggcccttacttgtccgaggtcctggcctcccctcatctctcacctaaacaggcttttccctgccctgggcctgggagtgcacatacctgctgtctaaggcagtgcttgaaggagaaatgtcccacccctcccacagtgagggaaatgagaggaggggacccacactctgagggcagtgacttatctgtggtctcatgggaggcaagacagacaacctgttagtgagcagttcagatggggtttatgggcaaggcatgtcggaggaaggaaggacagagaccatagaacttcagggctgagagggacaccgtagcattcctcacctcccccagagaagtgaggccatgacctccacattcgacctctacctgggctccattccacggaggagctgaggggcagctgagcaggagcgggggcgggggtggacagggtggccgggggcagcggaggccgcacagttggtgtgggataggtggtaggtgcaggctgggatgccagaggggctggggacaggtggaggcaagtctgaaaacctgtgcccttgagattcggagtctccctgcctcagcctggtcatgttaagggtcagccatggcacctgggtggtggtgagacagggtagggagcacagagctgctctgggcctgtgtgaagcaccagggatttcctggccttgaggagaccccagtgtttcaagccggtgcccgggtgccctggctggaccacactggcacaacacgcatgtagacggcctgctttccctctggctccaggagcgtgaagcagctgtctctttctttcctttcagtttgagtgcatgagggggcacatttgggcagggccttgcgctattgctcatttgtgaaattggctcctttaaggaagctgcagatgagtcagctctggagtgcgtcccatggatggcgacaggacccctgtgttgccttgtgctgcccccagcttccagacggtctgcctggctctacctgggacaggcttccccagggtgtttgccagtgaggaaactaaggctctggcaagatgagtgccctgcctgtgaggacacagataggaccagagggcttcagcatagagcatgccacaggtgtgaattggggttctctgtggggcccaagtgggcaccaactgtcccatggaaaactgtgacacttcgggaattccactagagctcagctgctaaatttctcttttgtcctctggtaaacactgggatgcttttttaagaacctgactctctctgtctcaattcctgtgccctgtcctgttgggacgtcgaggccgggattagagcagcccctttaagagtgccagtgtcccagaccctgctgtggaatgccagccgcctccctgcagacagacatcgctgtgctgtcgtcctgtctccgtgagggttaacaacacttcagcctgttgtctggaaccggttcagactggttttctggaaagtgctttgtctctccgactgaatcctgggaagggtcatgtggagccagtgatgtcatgggatcaaaaactgactcagctgtttttttcttctttttctttcttctttaaatcaagatatgtgtgtgctgcaggtacagggcagtggcacgttgatgggccaggcctcactctactcaaagtgtacctcactggcaaccaaagggttaaatgtgatccccagtccccactccccagaggtgagcagggagtgaggagacctcccttccctgaaggggagaagctggggttaactcgagtcaccacagcatagggctagtcccaggccccgaccctgctcctggaacagtgcagtcaccgccctcctggattccagacattgcaggtgctgaaaatcccaaaggcaggtagttgagatctagaacaacttttcctctgtttgctgttgagcctttccttgctgataagcagccaccttccactgctcctgttcagcaccctgctgcctctggcccccaacagggcagggtgtagtttggctccaccaatgttcagccacacagtggaggctggggacacccccctcctgcctagccttcctcaaggcagtgatgaaatgtcctggggatgcttttctgggccctgcgtttgttgtacattcttttgccatccttcccatagggaggaaaacactgaaagcaacactgaaaagtctccaagaaggtggcaccttcattgcacccagttaaaatgttgtgtcttctcctccctcccaagttcagaatgaccgaagaagcatgccgaacacggagtcagaaacgagcgcttgaacgggacccaacagaggacgatgtggagagcaagaaaataaaaatggagagaggattgttggcttcagatttaaacactgacggagacatgagggtgacacctgagccgggagcaggtccaacccaaggattgctgagggcaacagaggccacggccatggccatgggcagaggcgaagggctggtgggcgatgggcccgtggacatgcgcacctcacacaggtgagtgggaggagccagcgggaggggctggaacctggagacaagcccagtgtgcccaggttggggctggccacactccaggcctgttggtaacagcttggcggggttgtggagagggctgtaggctcagctcgggcatcacccaccactggcagctgtgctgttgtggccattccagggccccaggtcccaactgcaagtggcacagagtgtgggtctcacaggagaaggagtggcacattccatcagctcccctgccatcagtaggcctttgccacccacgcacctgctgtctgtccaactcggtgcttttggtttgtagggacacttgagttattcatttggttatgcttccctgcttttcagatctagaggtcagagggccaggaatgctacacctaccttggtcacttggctagggatagagttgggagcccagcccagggcaccctcctcggagcgggtacgggatgctcactcgactccatgttcacttggtgctggtctttggcttgctctgttggtttgtccttagtcaacactgattacttcaagagtgactttcctcatattcaccttttatgagtctcttaaggtaaaagcttgaaataaaaataagacccaatctaccacctatttcttgacttcaaaaccttcctttctctctgtaaagacaaattcagacccagcacctgctcttgcatcacccctccccttggagctctccagaatgttcatgcccagacacccactgagggctgtggtgtggccacagcttcccggctggccctctgacaaactcctctgtggcccgttgctctctctcctcaccgcccactggagtcttctccctgtggagggcctgtctctccacgcctgttcataagggacagctggtggctcctcaccttcccgtgtcagctaaccccacaggatgaccccagcctgcagtcttatgtcaaattcgtttttggaacccaaactgttgggatcctgaggacttcagagatcatctggtgttcacagcgtttaaaatgggaagataaatgggaaaacccaagcctgctcctgttgacaaagcctcctagtctgaggaaatatactttgtagtcctgctgtccaaagagggcttttctgtctgactctgctgtctgcagtccccattctaaaaccaaggtcctcttctaaagttccagaaataaaactataggtccaagtctccttttcctttctctatgttttcagccagagaccagtccatgacagctcagcaggggtgagcagtgaggggctggtgtggagtcagggcaggaagaggaggagtccatgttcatgggaatctgcagtccatgtgcatggggtcccttgtgcattcctgggttgctgacatgcattttctcctgtaatcaccatgttcccctgcagggtaggtcagtggattgtgagggagaagttaagtgttaaagaaactcagagttcagctgggcgcggtgactcacgcctgtaatcccagcactttagggggccgaggcgggtggatcacaaggtcaggagattgagaccatcctggctaacacggtgaaaccccatctctactaaaaatacaaaaaaattagctgggtgtggtggcgggtgcctgtagtcccagtgacttgggaggctgaggcaggagaatggtgtgaacctgggaggcggagcttgcaatgagccgagatcgcgccactgtacttcagcctggggaaagagtgagactctgtctcaaaaaacaaaaaaatattgctagcacctctgaagccccctcatgcttgcttgctgccactgtcttccaagggtaatcactttcttgacaatatggattagtttttcctgctttggtactttaaataagtgggattatatactatgtaccttttatcttcctgctttcactcagcattgtgagatttacccatattgttgtgcataccagtagttaatccattttcattgctgtatagtattttgtttatagagtttctatttgggtatttttcaaaactacctttttttctttcatgctaacttattaccatcttatgaccgaatctgggcatattgaaagctagaggcagtttctgatggcttctaggagagagaatttcctttttctttagtggctggtgaattggaatcatcaagaaatatatatgtttgcatgtgtgtgtatagtgtacatattgctatgttggatgatttggagcatgcagaggcagatacagtagtagaatcagctttctgcctccatcttttactccgctccctgtcgctctttaactcagcagtttttctctctcagtctcccaacttgtgtgagtgttttatattctacataaattgagggtggagggcaacttctggttgtgttgaatgaggagattggcagaattgacaaaagcaaaatgaaacaatctcagcattctggaaaaattgagcaggggcatacaacaatctgagaagtatttatgcctgtaactgctgaatttcaggtgagaacagtgagactgtatggcatttggcctggagctattcctatgccctctcccatctgtttggtaaagaggttctgtccagccactgtcagctttgaggaccaacagcttcgctgtgtgggtgaaaaggaggactgttcattttagagtggtagcaaccctgcctgtggtcttgtagatgagagtgacagtcttggagatgggcaagtggggagacacagcggctctgttttagcccaaggttggggcaagatagaaaaactatttgaagaaataatgggcaaaaacatacttgaggagaaactcatccaggaatcccaacaaaccctaaatagcataagtacaaagagatcttgacctagatacatcatagtcaaactgtagaaagccaaagaaaagaagaaaatcttgaaagtagcaaaagaaaaacaactcagcacatctggggagcattaataagatgaacagctgacttctgactcgagacaatggaaacaaaaaggagttgaatgatgttaaaagtatccaaagaagaaaactgccaacccagaattctataccagtaaaaacagtccttcaaaaatgaaagcaaaaaagacattgtcaggtaaacaagactgaaggaatccattgctggtagacctgccagttcttcagcctgaaaataaatgacacgttggcagcttgagtctatgagaagaaataaagaacactggaaatggtaaatgcatgggttaactggaaagacttaactagttctgcagtctggaagccaaccaaaggctttgaatgatttgttgggtttataatatccacagataaaatatatgtcatattagtacaaaagatggggaattaaatggagcaatattggagcaaaatttctgtatcttactggaatcaagttagcatcagtcttatatagattgtgattaagatgcttactgtaatgcctagagcagctctgaacaaaataactttaaaatatagttttttaaaaaaatcagggctgggcacagtggctgactcctgtaattccagcactttgggaggctgaggcaggtggatcacaaggtcaggagaccaagaccatcctggctaacgcagtgaaaccccgtctctactaaaaatacaaaaaaattagcctggcatggtggtgggcacctgtagtcccagctacttgggaggctgaggcaggaaaatggtgtgaacctgggaggcggagcttgcagtgagccaagatcgcgccactgcactccaacctggatgaaagaacgagactccatctcaaaaaaaaagaaaaaaagatcatcagaattaaagttatacactaaaaaatatttaacacgaaagaaggcagtttctttattcactgagaaataaaggaacaaacaagaggacatgtagaaaacaaaatggcaaatgtcaatccagccatgtcaataatgcagtaactgtgaaggatctaaatacctcaatcaaaaggcaaggactatcagatagtgtaaagaagcaagattcaggctgggcgcagtggctcacgcctgtaatgccagcactttgggaggccaaagtgggcggatcacaaggtcaggagtttgatagcagcccctggccaatatggtgaaaccccgtctctactaaaaatacaaaaattagccaggcgtggtggcacgcacctatagtcccagctacttgggaggctgaggcaggagaatcacttgaatccgtgaagcggaggttgcagtaagctgagatggtgccactgcactccagcctgggtgacagagctccgtctgtctcagaaaaaaaaaaaaagaagcaagattcagcttaattatatgttgtttataagtgacgccccttagattcaaggaataatacaaaaggatggaaaaagaggtaccataagtaaccgcttgagagctggagtaactgtattaataagagataaaagacactttaagaccaaaaaattactagagccaaactgcgactttatttttttttttgtttttttttttttgagacagagtctcactctgtcacccaggctggagtgcagtggcacgatctccacctcgtgggtttcagtgattctcctgcctcagcctcttgagtagctgagactacaggtgcccgccaccacgcccagctaattttttgtatttttagtagaggcagggtttcaccatgttggccaggctgatcttgaactcctgacctcgtgatccgcccgcctcaccctcccaaattgctgggattacaggcgtgagccactgtgcccagctgcgacatttcatatgatatttcaggaagacataacagtcagcagagcccccaaatacctgaaaacataaacttgataggattgatggaaattaatcagttatagttagagatttcaatatcccactctcaataattggtagaacatctagacaaaattggcaaggtatggaggacttgaagaacattattaactcacttagcctgacatctgtagaatacctggtgaatgcagaatacatcctcccaattgtaggtgaacgttctctgttgatcatacattggaccataaaacaaggctccagtatagctgtaaaaaacaaaaaaaaaaggaagtaacaagtgttgaggaggaagtgtagaaactggaattcctcatacattgctggtaggaatgtaaaatagcccagatagtttcttacagagttagttgtaaacttaccgtatgacttagcaatttatccaagagaaatgaaaatgtgtccacacagacaggtacacctgcagcagcatgattcatactggtcgaaaagtagaagcagggccaggcacagtggctcacgcctgtaatcccagcacattgggaggccgaggcaggcggatcacctgaggtcaagagtttgagaccagcctggccaacatggtgaaaccccgtctccactaaaaatacagaaatttgcctggtgtggtggcgtgcacctgtagtcccagctacgtgggaggctgaggagggagaattgtttgaacctgggaggcagaggttacagtgagccgagatcgtgccgctgtactccagcctggtgacagaacaagactgtctcaaaaaaaaaaaaaaaaaaagtggaagcaacccagtgtcccatggataaaacaaacctgctacctctatataccagattactgttcagctttataaactactcatgtgtgccataacatggctgaatctcagacttgccacgctaaggaggatacagcagatgcagggactacttgttgtatagtttcacttacagggcatgtccccccaaaaagcaaatttatttgagagatggaaagtgaccagtggttgactaggacagggctgggggtgggtgggagcagtgattaacaacacatgggcacgttttgggaagatggaaatattttaaaattgtatcgtggtgatgattgcacaaatttactgaaatcattgaatggtactcttacggtggctgaattttgcggtatgtaaagtatacctcaatatggatgttaaaaataaataattaaatgaaggttaaaatagtttggtttctgttgtggcatccataaatgtgcacacagaaaaacaaaacccgcagaggtagaagttgtgagtctgttggttttgtgaggccaatccaaaggtcgtgggcatgtgctgcccctatgccgagtctggactgtcagatgaggctggagctggcaggcagaggaggctgcttttggttctctgttttttggagttggtcttgcactgtcggccaggcaagagtgcagtggtgcagtcgtagctcactgcagccttgaacacctcggctcaagccactcaagtaggtgggaccatagatgcatgctactacacctggatggggtttttctgttgttctttttaaaaaattttttgtagagatggggtttattatgttccccagactggtcctgaactcctgatctcaagtgatcctcctgcctcagcctcccaaagtgctgggattatagatgagccacggcaccaggccggttctttctgttttgtttttgtgataagtagcagatccagtcctgcactttcctgtaggggagagtctctttctttcaaatggttgatcttcagaaataactggccacacccagatggaaatagcttgatttgttttcttttcttttttttttttgagatggagtttcgttcttgttgcccagactggagtgtggtggcgtggtctcagctcactgcaacctctgcctctcaggttcaagtgtttctcctgcctcagcctcctgagtagctgggattacaggtacttgccaccacgcccagctaatttttgtatttttagtagagacagggtttcaccatgtaggccaggctggtcttgaactcctgacctcaggtaatccacccacctcaacctccgaaagtgctgggattacaagtgtgagccactgtacccagccttgatttgtttttttttttggatggaagagcacgttgctcagtaaaaatgcggctcttctccaggggtcctgcaactgaaaggtaaggactgagggtccctcagtcaccttgggcctgcatggggtgagggaatgagaactctgtgaatggccacacctcactgaggatgtgtttgtatgtgccttttctgaagtgtcaactcttattggattgtcagtggtccaggaccagacctgctgtatgccaggtactatgctgatctctggtagagaggtaatcaagacaggatctgatttatgcagctatttttttggaagaccatgtcatgaaggaaagcgcagaggtcttggaaagaaggacttgccattgccgatgtggctcaccgtctccatttccttacttcacctgggaggagactgggctgtggcttccgtggtccatggattgggcagacttcaacacagcctaggtggatatctggcaagttgtccccgttagtggtgtgtggcgttcaggcagctcttgtgtcttgctcttctcttccccacctccccttgtaccatgagtggcttgtctgctgtgggagggggcagcacttggaccaaaggcctgccccatggtctggacggggcaggctgggatgtgtgttccttggccactttggggctcaaagtagcatctgtgctgttagatctgatcttggctttagttttttttggccttcagctccctggtcaagcacttgtggccagtgacagactgtaaaacacactggaaatgtagtctgtttactgggcctgcaaaaccagtcgcaattggtgacactggtgtccttgatgacaattagaatcattgccgttgtctttctttttagacttttgcagtcaccaagagggcggtggggtgacacatctgtgtcacttccctgcccagagaatgcactggctgatcatttgatattaagacaggttaggccacccaccacggtgagcatgcgtgcccatcattaaaatgcaggttaggccaggcgcggtggctcacgcctgtaatcccagcactttgggaggccgaggcgggcagatcacgaggtcaggagatcgagaccatcctggctaacatggtgaaaccccgtctctacttaaaaaaaaaaaaaaaaaaaaaattagccgggcgtagtggtgggcacctgtagtcccagcaacttgggtggctgaggcaggagaatggcgtgaactcgggaggtcaggcttgcagtgagcccagatcacaccactgcactccagcctgggcgacagagcgagactccgtctcaaaaaaacaaaaacaacacatattaacacccaagccttccaaaaccaaaaacaaatcagaaagtaatgtgatattgcttcttcctagacatccagccacccagttgtccagaacgtgggagtgtggacggctttgttttgttctgtgccaaaatggggccagctggaaaaaaggtgtgcatcacataatttttgcaagatgtctctgaggatcacggatagagtgagtccttcctgtttggacagatgctttttacagggaagggagaggagggtgaggtcgacactggaattgcccccaaccccgacaaccacgtgagcatggggctctcctggtgtgcccgagacagtgagttctgactcacgtgtgcacctgtgagtcaaaccctgaatttaggtcacaaactttatcacggcccagaaaccttaccatcccactccagaagggccctcacgcactcccagcccttcctgttttggtgcttcccctcatgagactggtcttgcctcttttccggttttccagggatgcactcacagagtcagtgctctttggggtccggcttccttctgagtgttttgggatttgcccctggtgtgtattggtgtgcctctgagtggtgtgcacagggcacttctcacttgtcagtagacatgtgtgcagcctccaatttgggcctggtgtgagcacccgctgctgtgcaaggtccctgcagattgtctgtttgtgggtacgagtcagcatttctcttggtaaacactcaggttaaactgcagggttacaaattgtgtgtgtggttagtcgttttagagaaacgactgggcttttcccccaaaatggtctgtgcttttcacactcacaggtgtggcagtccagcataccgtcttcacttgttgttctcagtctttatagttttagccactgggtccccagagaggttgaggtccagacttggcctacacgtgtggctctgtcttaagcccgtcacccttgtccctctttgatggaagcacgaggccaggcagaagagcccactgccccttgtgctagtcagtcacatagcggatgctcggacagttgctggtgccacagaacccctatcatcgttgtgttggctgcctgcatacgggtggaggggttgtcttcacagcgatgtgcagagctgagcttccaccccctgctctcaggactatgcctccccgcagctgctcccggcccgccggccggctgtctacaggaatgcacgtccttgaatgagatggacgatggactaatgtggcacagctgtcgacgtgagggctcaggaaagggctgggttctcatagcccagggacatggtttgtggccctcacactggctgcctcctacagccctcttggcagggattgaacccctaaatcccccatcggggtgccagagctttggaagtcccacagcaagaagccattttccctttgtgtgaccactggcctgtcccagagtcagggtccagacagggggctccggagcggggtactctgtgggcggctctctggagcccccccccctccactgccccagcccctccccagcacctgttgagggctggctgctgcctttcacttgctaattctctgtctgcttctgggcaacttccaggagaggctgggtggccccagggagtgccttcaccagctccgactagaaatccacagcctgcgggcatttcttagctcatgggaactgagaggtatgttcccttgggaatctgttttgtgctcccttccctgccttagccgctgcccctccaaacctcagtggccaccgtctgtctcctccttgttctctatgtcacccctttcctgcaggctcctcatccaatttccctttatctgggactctaatcccagaaatcgctgaaatgtgaggggtccacctgtacttctaagaatcgttagattatataggggcaccaggataacagactgccctgtttctaactccccaagtcctcagctcacatgagggccgtagcatgagccggcccggtgccaggtaaaagagcatcactgctggtcttcctgaacttcagcttctccaaggtgttgccagctccctgttgcctttagacgccctcctctggtcatggaggggactcggatccctaactttgaaatggggcttctctcttggacagtgcaggctctctggggatgttattatcctgtggtggctctgacagaaaaccagaggccacactttatatggacatcgaggtaatcaccagtaaatgtttggccttctctgtctgaactcttctcacacatctgtaagttgagcagatttgcagattaagcagacctcttccttctttttaaatgacttgctttctgttttgctgctgcggcttctgatatctcctcccagcatgtattcctgctgttgtcttatttgtcactcactgacaggcttctcttcctgtaactgatgtcccagctcctgtagcgggttatttaaatgtcccatccacagggacaagacggggagggtgtctgaccagcactccgctgtgcccactgaaactgggtttagctatgttgcttttcagtctgcagccagcttccctgccatgctgcaagcagttgcagtgaaaccaacctggaggctacggggcggcttctgagtgctccttaggccgagagccagtcctgtccctcatggtcccctaacctggtgaaggagtggagcgaagggcagtgggcgccaggccttgggggtctctgtgtgcagaacaggtagaaacagacggagtggatacctgggaacctgcaggggcatgtgtgatcccaggtgggacaggcaggcgtcacacccaggggggcagtgttttcccggttagcagaatatgcccctggaagaaaagaaaagcctacctggttagaagagatctttctgaggtttttcttctctctcttaagatgagcatatgaattataatttgtgagcctgagggggcagctggtggtagaaaaaagaacgtgggtgtctgacagcctggatcggccatgtactgaatctctgtgtggcctgggatagtctgcccccactttgtgaatgcctcttgtctcctctgtgaattgaggctccaccatagtgtaaagtcacagtgctgagaggaaggcagggtaacgcctgaagccaagctggatctgctgcctttggaaacactgagttacctgtggctgaggctcgggcagatgccaccgttctctctggagggtgggagacaagggaggggacgtctgatgggtggaaagatgggagacataccagatgttgctatgtgcctcccttgcttgggacctgtgccataggactgcggatttttagagcttatatctttaaaatagttgtgacgtcatcaaattgaaaagctttgggggttcatgcgactgagacttgatgccatgcagaattcctcaaggcagggccctgatagctttcgtacaaagagcattctaaagagagccatcagtccaggcctccaggagacttggcgtgtctgcaggcggtgtgggaagagtggtctgagggcactctctgggggactgcagcccagaaatcatggtgcaccgggtgcaggggtcagagtctgaaggtacacggtggtaggagcagagaccggaaaggtggtctgggatagattgttggatgcaggaagggtggaacatagagttgggactgggccttgggtttgggacccccctctggagaagggagagttgatgctctgagcctaggtggagcccaggatctctcaggcatttggacgggagagaggtggccaacttgctggagaaggaaggagattcctagtcccggagaccagcagtctaggggcagtggggcacaagattcagaatagcgtcctcacactgaggtcctgggtgacctggccagccatgttcctgtgtttgatccacagccatagggcgtcgcccgctttctgtgacttaggtaaacatagaggctgtacagttgccacataaggctgtaagaaccttaaggtgaccaaattttgttggctgatgattaaataggttttataagcaattatagtgtatctttggggtgaatcctattaaatttttagtacctctcacttttcaaaatacaactttggcagcaaaaagaaagttacatgggccatgatacatcagcaggacaggacccaggatcccagcctctgtactactgtcgaggctgccagagatgggaaatccttttcctgaagcactggcacctccccttttccatctgtgggccccagacagcagttggatttgtgggatatgtctgttgacatttactgtgttagaaaatttgaaaatactggccaggcgcagtggcttacgcctgtaatcccagcactttgggaggccgaggtgggcagatcacatgaggccaggagttcgagaccagcctgagcaacatggcaaatccccgttgctacaaaaaaagtagctgggtgtggtggcgcacttctgtaagcccagctacttgggaatctgaggcacaagcaccacttgaacccaggagacagaggttgcagtgagccgagatcgcaccactgcactccagcctcggcgacagagtgagactctgtctcaaaaaaaaaagaaaaaaaatttcagcctgggcaacatagcaaaagtgtctctactaaaaatccaaaaaaattgcagagtggtggcgcacacttgtagtcccagctattcgggaagctaaggtaggagaatcacctgggcctgggaggcagaggctgcagtcagttgagatggcaccactgtactccaggctggacaacctgagttgagaccttgtctcaaaaaaaaaaaacaaaaaaaaacctattattaattcatttaaagatgactatagtagacctgtgacatattagcataaataacttattattaaaaatctattttgcaaatctctttaatactcagcttactaagaaggcagctgctaggttcccgtggctatttctgtgtccatcctcttgcgttctttgtgagggtttgaagcatggtgaagaaaatgtaactagcatggagaagaggttggagagtggaggagcgtttccataggctttttggatcattgtgcgtttcctcctctaatgagaaaccaaaatccagagtggctagtctctactggtgagttggcccttagactctgaaacctcatcattgagctttttgtacatgggttacattaaaatccgtgggactcttttacactttgaacagaaaaatctgtttttaaaactaacttttaattttagaatagtcttagactcacagaaaagttgcaaagatcagtcctgcaaacctcatcccagtctccacattgttaacagactacagaacatgtgtcacaagtagtgagccagggtccatgtattattttaaccgagttcatactttattctgatttcctcagttttttccagctgtcctttttcccttacgttatatttaatccttgcgtctccctagattccttggactatgacagtttctcgtactttctttgttttgggttaccttgtcagttttgaggagcagaggtcaagtgttctgtagaatgtcagtgcattgggatttgtcagatgcttttctcacaggcaggtgatggatttgggggaggaagaccacagagggtgaagtgctcttctcgtcacatcatatcaaaggtactgctggtcttgaatgaacgatcgttttggtgaggtgccatttgtcaggtttttctactgtaaagttacccttccctccttcccctgctccaccatttccatactgtcctctttggaaggaagttactatgtgtggcccactcttttttttttttttttttttttttgagatggagtctcactgcgttacctaggctggagtgcaatggcatgatctcggctcactgcaacctctgcctcccaggttctagtgattctcctgccttagccttgtgagtagctgggattacaggcactttagagaaggggttgttcaccaagttggctaggctggtctcaaacttctggcctcctgtgatccacccgcctcggctcccaaagtgctaggattccaggtgtgagccaccgtgcctggcgacacagcctactcttgaggaatggggactcatgctcacctcttcaaaggtgaattgtctgcataaattatttgggattcttctgcctgacagttttatcttttcttcccctgaatgacattttactcacgtatgagtttgtaataccattgaatgttggaaaatagtagtttactgggttatagagacgtttcagatacacatatcatcatttagtgtcacaaaatcagatttgtcaatgtcaccacctatccgttgggaagttgttgagctcacagcaagtagcaaatataagttttccaaaattctgatttttgattaatggaagctcgtactttatcactggtaccagatacccttgggtgtttttcatgaagcaccaggctttgcatgaatgctcacgcgagcgtttctcttcatggcgccattccactgcagtatgcagcaggagggcttcttcctgtcgtactttgtcatgggataccacagagacactactcagaggttgacgtttaatcgcatttcatgactgccccccgaggtgagtggcgtccccttctgcagatgaagaaacttggcctcattgaggtttggtgaatgggccagtcgccccaacacctgcagaggtgcacccagccccctcagtggtcctcgtgggtcacttgtggccattctgcactgagcaactggagcaggtctgattgggttgtgggtgtacctagctggctagggggacaggtgcaagtgatggggatccagccacttgtgatgcagatgtttaaaagaggggcaggaggtttccaggcacagcgagcactttccattcattgagaaagtttgtggtcgtttcagaagcagtgtgtgtttcatgtttgtggctttcatgcacacaggtgacttctctctccctgtgtattggcgaggaagctggcatctctcccaggagatgccttcagttcatttgctgtagggagtccttcctccaccctgcttgaggagttctcaccatgttttctccctggaggaaagtgggcctagcatgggtgtagggaccagcatcaggaggggtgctgcgatcagtggccagggtttctcctcctctttgtcctttactctccccacaccaggccctcaggagcctggattcctgagctccacaaccatcctaccccttccagcaggctttggcccacttgcagtgtgagtgtccaccacctctgaggtttgtttctttccttttttaaaagacagggtcttgctctgtctcccaaactggaatgcagtggtacagtcatagctcactgtagcctccagctcctgggctcaagtgatccttctgcctcagtctcttgagtagctgggactacaggtgcttgccaccatgcccagctttttaatttttttagagacagggtctcactgtgttgcccaggctggtcttgaactccaaagctcaggtcatcctctcacctcagcctcccaaagcgctgggattgcaggcatgaaccatcgcacctggccatattttgtttctgaccatcccctgacttgtcttgtgatttgggtaagttatcatttcttgatagagtccgagggccacatctgtgtcctcacactgcctcctccttcacacctcagggacttagcttgtggatgctactggctgtccaggatccttcagccataaataaaggttcactattccaaaaatgacatagtggggctcagtggctcacgcctgttacagcactttgggaggctgaggtggaaggatcacctgatcccaagaagttcaagaccaagcctgggcaatacatagtagttcccatatctaccaataaataacaaattaattcgctgggtgtggtggctcgtgcctgtagtcccagctactcaggaggctgaggtgggaggatcgcttgagcccaggaagtcgaggctgtagtgagctgtgattgtaccattgcactccagcctggtttacagaatgagaccctgtctcaaaaaaaataaaatatgaccgagcgcggtggctcatgcctgtatctcagcactttgggaggccgaggtgggcagatcacttgagcccaggagtttgagaccagcctgaccaacgtggtgaaaccctgtctctactaaaaatacaaaaattagccaggtgtggtagtgggcgcctgtagtcccagttactggagagactgaggccggagaatcacttgaacctgggaggcagagtttgcagtgagccaagatcgcgccactgcactccatcctgggcaatagagggagacgcttgtctccaaataaagatatttgatgacctgaattagcagctgccagtcacatggggcctatcctctctaaccccacacctcctctttagggttcccccagggtcctggcacagtgaggggtccacacaggagctcaggtgctgtaggagcccaggttgtctgcaggtcctggtgtgtgaccttaggaagtcatgtggccctcccttaagattgttccctgtactgggaactgggggtaatgatggagctgtggagaggattatgtggaagggtgaattttggtggttggcctaggaatggccatcataaaggctcagcaggtgtttactgggtttttgaaacctgaaaagttagcctttcatttcttcgattgtagtcatttctaatgcatgtgtcttcctgtatttctaagcagaacgtgctggatttgatgtggcctcccccatggtgtcagctgctgacaagattgggctgcagtggcctctgtgggcgggtagaggctgctggcccacatgagcatggtactaaggtctcctaggcttgtctctactaccctcagccaagctattctgcacgcccccgagactggcccctgtcacagtgaggtcctctgggcctccctggctgggccctttgacttcaggggctgttgcgttcctagaaggcgttctggcagcgccggctggccgccccctggctgtgctgatgctgggggcgggcactgcatggggctcctctgctctagctggggacctgggactgctcccttctgtactggggaaaggagagcaggcagggatgggctcagaggtctgggccagccacacagactctctctctttttcctgagctctttagccagcactgtggcagtgctcaccataatggattcccagagcggtcgttggacctgaagtctccaggaagaatgatggctgagtttcaaaaatcccatcccagctgctcacctccacggcctctgaggcagagaagcagaatgtgttctgtcttcctgggccccacaaagcaggctctgggcttttctctcacatcccagccaagaggagctcaagttacatggcgggagaagtgtgatggatgctaagaagggagttgagggaaccgcagaggggctgcggctggcgagaagcaggtgggcctcagggcatggggagcggggtgactcgggaggacaccagacaacccccaggagttcttcagtgttttttttttggagactgagtctcggtctgtcatccagcatggagtgcagtggcacaatctcggctcactgcaaactccacctcccgggttcacgccattctgctgcctcagcctcccgagtagctgggactacaggtgcccgccaccatacccggctaattttttttttttttttttttgtatttttagtagagatggggtttcaccatgttagccaggatggtctcgatctcttgacctcgtgatccgcccgcctcggcctcccaaagtgctggaattacaggtgttagccaccacacccggcctagttcctcagttttggggcacagcctgtgtctagacaacagagctctctttctatcagctgagtgtctctgagtgaacaccaccccttgggaaaggagggaggactgcgtggggtcccagtgagcagcccccacgtccaggttgcagtgaatgctgccagaattgtatgtcagcacacccactacacaggggcctgacacacaagatattgcccggactggcctgggcaacacagcgagaccccacctgtacaaaaactttaaaaatgcagtgagccatgatcgtgccactgtgctccagcgtaggcaacagagtgagagaccctgtctcaatatcaaaaattgaaaattgaaaaaaattagccaggtgtggtagtgtttccctgtggtcccagcagcttgggaggctaagatgggaggatcactggagcccaggagttccaggctacattgaactatgatcacaccattgcactccagcctgacaagagtgagaccctgtctctaaaaaaagaagttgctcagtggtaggactaacttggggaactgataactgtgtcctttttctctgtcacaggatttttctttttctttttttttttttcttttttttttttttttttgagacggagtctggctgtcgcccaggctggagtgcgcagtggcacgatctcggctccctgcaggctctgccccccggggttcatgccattctcctgcctcagcctcccgagtagctgggactacaggcgcccgccacctcgcctggctaattttttgtatttttagtagagacgaggtttcactgtgttagccaggatggtctctatctcgtgacctcgtgatccgcccacctcggcctcccaaagtgctgggattacaggcgtgagccaccgcgcccagcctgtcataggatttttctaggagtgtttcttgaaggcaggtagagagactggatgaagcatgaggaattgctttctggcttgactcacttcactccaggtgctgcctgaagctggggtgcctcccagcctgcagactgcctcctccttttccatgggaccctcttcagcccctttcattgttgggcagctctggtctcccacatgaccttcctagagctgttctcatcttgagtctgcacctgtctggggggcctctgtgcaggctgctgttggtccctctgtcagggggtgctttaaggctcagtgggtagttacttgggtaaaccctttctttcccccttctctttccctgctttgtcccagggtagcatctgagggaggaagtggagttacagtgatatgggttagctccccaggggccagcctgggccattggctccattagcttagtggtttaaagcagcgaggtattgacgtttttcagtctgtcagttctgctggttggctggtcccgcccagctgggcactgttgctggggccctctggtctttgcagttgcatgtcagctgggctgggtgtccccagtggtttcatcactcacatgtgatggccaaaacagctgggactggctggaccagtctctgtgcctgtctccatctcccccactatagcgggggctagtgtgggcctctgatcccgtggtggtttggggcagtcagacctcagctctcctagagcaagcattccgagggctcaggcagaagctgcaaggcttctgtgacctcacctgaaaaggctgccacgtcacttcctctgcattctgtagtttgggaattgagccataaaaccagcccaggtcaagtactacgggggctatgagtagatgcagccagagcctccggcctcctcaggactgcagagatgggccgggggccttgcagagtttggtctggtgtacagggtttgtcagccatgagtattagggctccttcttcatatccacaaaagcgcttggactcaaaaaataggaatttggcttccagggtctgttgctttacaaagacgcacgatgacacacaattcagaaatccttgtgagtgagtttccctttcctccagcagcacaacatctatgtgcacgagggaagcagctgcccaccgtgcaagggggtccatcagtccgtggcgctggttcctcctgaactcacagccccaaccctggaacctccatcaaggcaagaggaggaagtgggcgctccccagccttgccaggcccccagcagacccagtctgcccttggggggtttgtgaatgttcaggtgtcacatttcaggacctgtttactgagattgtctgctctgtaatgggctcccactctttcctcagaaagctgtcaggtcaggcagatgtttcaggtttgccattgcttccatctgggagctgcaaggcgaaggcacgggcggcctgtttgctgcccttatcttcccagtgttggggaccccaggaagtactgtcttctaaggcccgacaatccaaaagaaaatcactcctgcatgctcctatccccttcaaggttgcatcctgtcagagcatccatcttgcctctggaggccgtggtgctgctgccatctgggttttgggggctgctggatgtgggcggctggctctgaagaggcagcatgtgatctgacagcaggatgctcccgccccaccaaatgacagccttggggcagctcccggcaaacaactccatttccttctccgaggtgggaatgggacctggtgcaggggacgcaggctgtcggggcaaacctctctctccattctaggggcatgcagggtggctatgagtgctctcaggaaggtcactgttcccgaggcctgagctgagcactttcagatcagcagggctgcctgatccccctgcagccagccggctgtctaaggtgcccgagcctcctcagcactgaagtctcacctcaccaggcagccctgagaggctgcgggacagggattcctctgccctgccatgcaggagccatggagagggaagtgtcacttgcaagaggcagaatcaagtgagacccaggtgtcttctagctcactgggtgagggctctctccacagcctgacttgccggcagtcgtttgaagtccaaggctgggcaagggtggccagtgagctccaggcctcagcttgctaaaggagctactccacaggagcatgcgggctcagggctcagcaccctcacatgacaggctcagccagcctctcccccatccccagccatcatagacttaggaggagattcctggctctgaggacatgggggcttgcccccttctctggggctgtggtatcaccccagggctggatacccccttgccctttgttcatctggtcctgggaacaccttgtcccttgttgggagctgaggctgtgccacagagtggggccataggtccctgggtgctgtgccggtgccacacccacctgaaggaggtcgtgatggcccccagctcagggtgcaggaacctgcttgtcagacaggtgctgacatgtcaccctgcaaggcagggggagggagggctcatcttcataggggggtggggtggggtgccgtgcagggagccaaaggcacttagatgggcttgctgggccgagggtgggtgggccagtcactgggctgggggtggctaaggaacacagacccaccagccagcccttcttgggaagctctggggggtttctgctcagacctgcactcccccgagtggaaccccgagttctgccatgaccttcaccccgaggcaaggggacagggccgggcaggcttcctgaggcatgttgaagagggatgttctgcaggcagaacatggccatgctgggccatgtctgtgggccaggccccaggagggcgggggatgttaacagcttggttcatgtcaggtagggcctggtgagcccaagatgagtgtttgcacaagggacaagtgagctggcagggctggtgttggctctagcagagccctcatcccacccttgcacacagccagcagcccaccctgctaggcctgaaagaggtgaggaggaaaggttctagtgggaaatggttctgtggctggagaaggcattgctgggccctgcctgtctccccaagccagcctggaggaggatttcttgtaccgaggcctcacgagctacaggtcatggtcatccctaacttccctagtgtgtgcaagacttgggggatcttgctgaaatacagactttgatcaagcaggtctggggcaaggaggacacgcttcatttatacaagttccggagaagctgccctgctgctatggcggtgacagcggtggtcagacattcacggggccagccccaagcccacctacagccttgcccccacctgccgctcccctgttgtgtctgtccatcctggtagactgaaccctaaggacagaaattccttttatccaggggttcctccccactgcctgctatagcacctgctttttaaatgagctctcagcagatgtaaggaatgaatgaatgaatgaatgagggagaggggtatgtctttcctgcataccaggcaggcctgttcagagaaccacaaaggtcccagcctccaaggacagctccttcccggcactggctgaggggacactaaatattaaccacgtactggccgctggttgctgagcagctgaaagccataaccttttgctgtggaagtgggatcgtgtctcaatttaagtttataatcccggcctctcctccaggaaattctatggaagttcctggcaggtaacagaatttctgtgcttgtgaggtcagggccagtgccagcgggtcagggagtgggggtggtgcgtgtcagcgagcgggtgagaccatttacgctgataacagcctggcctgcttccagggatttttgtaggtcacataaaatctcttgatcactacgttttacattaaggcttctcaagatgggcaggacgggcttatgggatttgtcctgaactatcacatcacttccaaataaacttggtgcccgggacggctgctgtggagtgaatggcagacgctgtccctgggccacgatgccatccctctcagcatgttgggctagatttccactggttttgtttactttagacagtttttataattaaatatttccctgaaataatgcctgcaatcattttgagccacatgctctttttcctgaattaaagatctcttttagaaagtactgagactcttaaagcctctctcctttaaaaagtgagcttaacaaagtttttcattttagaaacttagaggggccagtgaccctgctgtgtgcggtgtatgtagaggtgactggagcctgtggtgcagcaacagtcccctgtgggctggcgccacacaggaagtgcctgcagctccacagccctggggtgagcctggcgcctccattttctgacagtacctgaacctttacctcccttctcaaaatgaaggctgcgtgtcacaaaccggttggaactggccgttgccatggttttcacgttggaaggcacagttaaagggtcatgtgaccaaggagggaaatgcctttgtcacatgactttttggtggcctgattagcatacaggaagttcactccctgctggctgctgggatgctgagtgatcattgatgggtggtgacatcatctcttggatgagttattgattagtcgcaggccaagatggggccagggagcgctgtgggcagagcagccctctcaggcagcttcagctgctaggtggtctggacccctcgcctaccctcttccttcaggcaggtttgaattttattagacatctcacctctggaagaagcacacgccctcaataagatgataagaagggttaagtcccttagagcttggctgtcatttcatttcagctcatgctagcccaggaattgtgtctgtaactctatacaagatgctgccttggccccctgctcccctgttcactttggaggccacctgggtggaggccagctgctgcacctctgtgctgaagccttgggactgcctgcctctgaggtgctcagtgtgtgtacacgtccagggaacctggaattagagccctgaggtcaccttgaaagtcgatcttgggcggcatggggccggcagcaaggagagacatgctggcggtttgctaagacctgagtgaggtgtcctgggttactttagaaacaaactacccggttctgggcttcagaatgtgggctgataaccccttgcctgggggattgtatacttcgaaatcgtacctttctgtccacgcccaggtctctggtgagaagctgcttcatcagggctaggaccagcgttcaggtacagccaccacgtagctgtggtgggtggaattaggagggaccagaggagagcaagtaaagcggttcctgagtccagcatctggcgagtccagggtagcattggtgaagccttaacctctggtgctctgtgtctacccttccctgaggacgcagctcatgggtgtggaggggacctcagaggtcccgagggctgctagagcagagtcaggttcttcatcctagcgactctcctcaaccctgccggggtctaattatcaactagaccctggcacagcaagagccaggacaactttgagctgcggcaaccagttaactttgtccgagtttgttctctgggtcacagtgccacctagaggacgtgtctgtccttggctggttttcctgctgacaaaaaaaatggacttgattcacttcgatgaatgtacaatgaggccgaggcgggcggatcatctgaggtcaggagttcaagaccaccctggccagcatggtgaaaccctgtctgtacaaaaatacaaaaaaaaaattagcccggcatgatggtgcatgcctgtaatccagctactcaggaggctgaggcaggagaatcacctgaaccggggaggtggaggttgcagtgagccgagattgcactacggcactccagcctgggcgacagagcaagactccatctcaaaaaagaagaaagagaatacaatgaacccagatcatcagggacagtttgccttgtgccgtcagcaaatggagctgcttggttggggacaaagtgccatctttgggacttgcgttgggtcagcgacaccacagcaggtgttcagccttgcgccttcagtagtgtcagctgtacacatacatcctagaggatcgttcacaggaaagggaaaatcagactagtgtgttcctgcctgggtcaaatgacttggggtgccttgagcacttgtctcggagcctggcctgcagttagcacagaatggatattcactgtttcccagttctgatgaataacagcagctcatcagccacactcttagacgtttgtgaccatactttgacaaaataacaaaagaggaaagcctgcaagtacttccccgattgtcccctggtgcttcccaactggtagtgagatgccgtgggccgacggtgaaaaggggaggaacaggccttaggtcaagttcacaggtggaagtgagctccccagaccgtggcaaattcattagaaagaaaaaggtgtgggggctggaatcatgagaactgtctcatgttgcagttttgagctgggacttacggagtgggcagcagggtaacaggcagaatgaccttggcatccacgtggggctggaggcagccagccagaaaccagtccatgagtagatcaggcaggtgaagagtctctggtctttgagagaacttgtgtcctagtcagtttcaaaacagacagccactgccgccatgtggggcccaagaagggccatctagcacctggtgccaccttgtgagcaagctggcagcctgtggatacacccctcggtcttctggggacaggttggctgccaggtgtgagggctttggcctgcctgagtggagagaagaaaatctggttcacgcagggagctgggctccccttcaaggggtttccaccatggccaggggctgcgggctggtggcgaggcacacacatgccatcagacccagcatgctcaagcccccacaatggctaacactgagcagggccccaggatcccgagccgagtgtttacctgatccgaggcacacggtagagggagcagccatgttttccaaagtcaccatgtcatgctcaggggcatacgcaccctcagccctggcgacatggcggcaggcatgaagtccctaccatcagggtgcccacctgggcactgggattgggtgccctatgacgtgtgggtaagaagaaggaggcagcctgggagccatggggcagggcaggggatgtggaggatgcagggcagacagggaacagacggggaggtctcagctccctgccatgtgtccacaggggtgggcactgggtccagctgtcaagggcgctctggtcactactgtctccaccccacagtgacatgaagtccgagaggagacccccctcacctgacgtgattgtgctctccgacaacgagcagccctcgagcccgagagtgaatgggctgaccacggtggccttgaaggagactagcaccgaggccctcatggtgagccacgtgttggcgctgccgccggagccccactgtgcccttcctactcatgacaccctcaggtggagctagtgatggcagggcctctgctcctcaccaaggacgctccctctcaaccctgttcctctcgcccctgcagaaaagcagtcctgaagaacgagaaaggatgatcaagcagctgaaggaagaattgaggttagaagaagcaaaactcgtgttgttgaaaaagttgcggcagagtcaaatacaaaaggaagccaccgcccagaaggtgcgtgcctgtctcccctccttcctgggccagcaggagcgcctggccttgccttgatcccctcatcaatgtcagcggccagaaaggtgaaagggcttccttgagggagtatagggcaaggtcccactcccgcatttgtggactccagtgtgcattttggattcagcttacaagatgttaaagtgaatttcagtctagagtattctggttctgagggtctaaagctcacttttttttttttttttttgagatggaatctcactctgtcgccaggctggagtgcattgacgcaaccttggctcactgcaacctctgcctcctgggttcaggtgattctcccgcctcagcctcccgagtagctgggactacaggcgcgtgccaccacacccagctaatttttgtgtttttagtggagacggggtttcaccacattggccaggatggtctggatctcttgacctcgtgatccgcccacacgggcctcccaaagtgctgggattacaggcgtgagccactgtgcccgccctaaagctcacttagacaacaggtgtcaaggaagtggagcacagatgtctggtgccgctggaagcatgtttctgggtgaagcactctgtgcagaaaggccgcctgcactgtgggcgcaggggatgccccagtctctaccatcatccctcctgctgtgtgcgtctcagtcccctcccagctgcaagtgtgctgagctcccgtggatctcagccccaactgtcgggagggtcctgcttctgtttcttcttccctggagcccgaagctcgctgttgcgctgcttctagatgcagcttaatgggcagcgaggttaagtttattttgttaggctttttgagtgctctgttctgggaaactccgaccttccaagtactttagtcattgcctcagtgacccagaaagtaagtgtgttctgggcagcaggagctgaaggaaggacaggactctctctgctctggcttggggtttgttttttgaaaccctgcccccactgcccccgcgccccctccccgccccccaccttacacctacctagttagcaagtggattggaaagagcctgctggtttcttttttctatttctttgtcacttgtcgaaaactcatggagggacaccaagtctgtcactggcccttctctactggaacatgcagctttaaaaagtgcccagagtcaccgttttctcactgagattgagatctccctgtctgggccatgggtcctttgcctcagcagtgctgccaccatcagccattctgtcccctagagggcacagcgggtgccaggatactgcgtgggtgtcagggagcagccaagaagtgatgctgagagtagggggtggggctgctggaaaatctcttctaggcccatgtagaaattgtcacttcccactgcagatggggtcactttcagccttcaagcagaacctctgagcgcctgatgccgtagaggaggaagacagtcagtcctcttcggcagcattaaatcttggcaactccgtgtgaggagagggaccggcccggtggcccctcacctcctggtgtcctgctctcttgcagcccacaggttctgttgggagcaccgtgaccacccctcccccgcttgttcggggcactcagaacattcctgctggcaagccatcactccaggtcagtgtcctttctgcgtctcactgggtgccctgctggcactgctgctgtcaagcacaggctcctcgggctcccaaacagccctggcccaggttctgcaagaggttgcgctttccttctgagtaggctggagtgaggccctccagcccacagcctaggggaagaagcacacgtgcactttccaagccccacggcccaaagtaggccactgttaatgtcacagacagaaatcatggccaacactggaagggggctttccagtgagcgcccctagcaagcctgatctcccttcgtgttgactcttccggccagagagcctccttccagggcctccaggtgaggggcagaggttttctcccagccatatggctgaggtcagaagaggccctcctgcccctccctctcaaacaggcctgagccctcagcttgctctagggggtgaccatgcccatcctgccgtgggccggccagtgtcacgtgagaatgaactgccacgttggtgggactcactcaggagtgagcccaggtttgcacggctctgggtggagtcactattccttgttccagtatctagaatcagtagtcatctttcttaattttgtgttatacgtttgccttgttagtttgtttgagacagggtcttgctctgttacccaggctggagtgcagtggcacgatctcagctgactgtagcctctgccttctaggcttaagccatcctcctgcctcagcctcccaagtagccaggattacaggcacacaccaccatgcctgggtaatttttccattttttgtagagatgaggtttcactgttacccaggctgttctcaaacccctgggctcaagatatccacccgccttggcctcccaatgtgttggaattacaggcgtgagccaccacacccagccagcttttttttctttttttctttttttctttttgagatggagtcttgctctgtcgcccaggctggagtgcagtggcgcgatcttgggtcactgcaacctccgcctcccaggttcaagcaattctcctgcctcagccttctgagtagctgggactacaggcacgtgccaccacgcctggctaatttttgtatttttagtagagatggggtttcaccacgttggccaggctggtctcaaacttctgacctcatgatctgcctacctcggcctcacaaagtgctgggattacaggcatgtgccactgtgcccatccataattttctttaacttctctgctacttaaaaaaaaaaaaaaaaaaaaactagtatgtactttcataaaagcagcaaaactgcttgctttaaaaaaagtgtgggggggtccggtccatgtaaatctgggtcttggtatcgttggcagacctcttcagctcggatgcccggcagtgtcatacccccgcccctggtccgaggtgggcagcaggcgtcctcgaagctggggccacaggcgagctcacaggtcgtcatgcccccactcgtcaggggggctcaggtaagcagggctgtgcacatgggggagacctggcagcctcagcagtcgtctaccttgaaagtagggcccttcccagtccttgggggcaaggtgccctgtgccttccggtcccgctccattgttgatctcagtcagatttcttgttctccccaccctaccccaacagcaaatccacagcattaggcaacattccagcacagggccaccgcccctcctcctggccccccgggcgtcggtgcccagtgtgcagattcagggacagaggatcatccagcagggcctcatccgcgtcgccaatgttcccaacaccagcctgctcgtcaacatcccacaggtgagggctgcgccacactgtgccagggagagtgtgtgtcccacctgtgactgctccccttggacccaggttctggggcacagtagtgtttccctgggctgtgtggcatgacctgccttgctctttcagagccaggcaggggcttggacttgagctcctgggggccacagggctgtctgggtcgtgggcagaagttttgtgggcagacttgctatccagcacaggtgggcagctgacgagaggggcgatgcacggacctgagctgaaggtggggtctgcttaccagccccatggctgaggaaacagcatgtggcacacagcaggtttagggggatagtcgaggcccaggagaggccggtgatgggcccggagatgccttggggggcaccggagcccatgccgccctcccggcagtggcttcttccgattgcctcctcagcaaatgttctcatgtcaccaggtgcgcctattcttagccgcacgtcccttcacctctgtacagagcctctcagatggggagggtctgtccccacccactggaagtaggatgggaagagcagaaccaaggggcgggtgggctggaaacaggcgccttggctgacagataaaattaccaggtctgcaggggcttttgttggtgggcgtgttcgctctttcttccctctttggcacagtttgttcttgcccaccctcctcagacaagagcaaggctctgggcagtgtccctgcctgctttcgaaggtcaggttcgagtgcagagaagatggctagtcctggactgacccaggcaggtagtttcatacacctgttgactttttttcttttttggagacagtcttgctctgttgcccaggctggatggagtacagtggtgtgatcaaatatctttattttattatgagacaagagtctccctctgttacccaggctggagtgcagtggcatgatcttggctcactgcaacctccatctcccaggagatactcctgcgtcagcctcccaagtagctgggactacaggcgcctgccaccatgcccagctagttattgtatttttagtcaagacagtgttacaccatgttggccaggctggccctgaactcctgaccttaagtgatccgcccgacttggcctcccaaagtgctgggattacaggcgtgagccaccacatcctgcccacccgtgaacttttatccagtcctttctcttgtctttgtttcctgagggtgggcacaggcagtcagtggcagagaaggtggtctgctcctagcgtggctgggggaggctctgaggggaaggaggaggggaactggctggtcagaggtgagggaggcctgggtttggtcttggttgctgaggggacaacaaaccagcaggccggtctctgggaacctttcttggggggtgggaccctgggaaggcatcctgcacaccctgtgccccacagtgtggcatttgcaagtcattgggtgtgtccattttctgggggtggggtgcacagctttcatcatatttccagaggggtcctcagcccctaaaagcaataacattggcatgtgggcagttctgggtttcagggagagccctatccagcagttgtggggctggtggagacagtcaagggtctgctcctgggatccaggcaggactgtgaggtggcactggagcggtgaggactgggtggagggcaaggggaagaggttggcctaggagctgcttcccccatcgccccataaggactcggggactacctcaaacattagcatcccaggggagcacatgcagagaggctcatgggggtgctgcggtgagcaccctcttaccctgtgagaaggcagtaggccaggccacagccagaggacagtggccctgctgggcagtgtggtgaccaccagaacctggtgacagccacatgggtgccctcacattcacatggcggagcacagcaaactatagattttaagtgtgtgcggtttatctggtaaacctcggtgcacatgtgcagatgagcagccactacctagggtggtgtgtttctcgcgcctctccctgctgccctggcttctgagagcctgttatcatggctgggttcacttttgttaaggacgccatcgtcaagggtactggttagtgcagttgacaggacctcgggcttcggggcgctggggagccttcctctgggcaggcgcacggagcgccctgactgagtttttgtctcccaaagcccaccccagcatcactgaaggggacaacagccacctccgctcaggccaactccacccccactagtgtggcctctgtggtcacctctgccgagtctccagcaagccgacaggcggccgccaagctggcgctgcgcaaacagctggagaagacgctactcgagatccccccacccaagcccccagccccagagatgaacttcctgcccagcgccgccaacaacgagttcatctacctggtcggcctggaggaggtggtgcagaacctactggagacacaaggtgagtggcctggacccagccgggctgcttccgcctctggcctccaagggtgctgccccgtgggttctttccaacacacagcagaggctggggcagggctgcctagccaggatggtcctgggtgggcttggcagggacaccgtcagtgccactgtggagtctggacactgtcctccggttggggcctctgagagccaggccccgagaggctcagggtccagggggacgggcagtagtggcctccgtgacgttggcgtgtggtggggtagacgtgagggtgcacatctgtgggaggctgacagggttggcctccacgaagggctctcaggccaatgtggagttgtgacacacaggcagaaccttccagagcctcaagtgctcccagcttctgaggagggagagggacagcccaccccactgcccaggggcaggctcgcatgatcaccctcttcaggcagcgtgggagtgcactgtgtcctgggggatttaggaataaaaagacatctacggggtgatcacagcattggagacggctgggcgggtggatctgagtggccgagttggcccccagggagcccctgctccccagacatggagaccaaggacgtttctgcccacaggttgaggttggggtgacacgagtaggccaggaggctgagtcctctcctggtgactgcatcagactctcagagcagaggagtcggcaggactgtgaggggcccagggcaggggcagggcctggcagcctcagagccttcccagcacagacttgggagcagcggggtgggtgtgtgcagagaagcacctcccgcgcactgcccaggatacagagggaggagggcatgggggccaggtcgagctgtgcccccagcacctggggttgggaagatgctctccccactctcttagggtactttggtgcatcaactggtgcccccatgtggttgcacccagggtccccaagaggcagagctctccacacttgcgtggggctgggcctggcgcagcctcagagtggccctcaaatgtagagttgcttgtaacccactcccttgcccctcagtcgctctcgtaactcccggccacaggatggtaccgagactaactgcagcgtgccccaagggcatggcctccagctcccagctgcaggagggacctgggggagctatggggaggtgaggctctgacacagcccggctggtgcctttggtgcctccttttcgacaaggtgatgtcggcaaaagagccacctggggctgctgtaggaaatgaggattgggggccgagttgggaccagtgcctctccttgcccctgcctgtgcgggcatccgctctcccagaccagtctgtctctgccgttccctcatcagggctcagtctccctctcctgttgccaaggataggacctcactgtgggagagactttgagccctgctggaggcatctcctgacacctcccagagcccccagcctcgcaccatgtctggttctggcgccgctcacgctggccatgggttggacgtgtgcaaggagatgtgccgttgtcaccagagcatgtaagctgcaggtggcggtctcatgggtcaggggcttagaaggggccaggccagtccaggcaggagagggaaggccgagagtctcgccacatccatctccccaccccccagcccctgcagtcctctgacattgtctgtgatgaccaagagcaattaaggcccctaagtgctgaacacaaaaaaggtcggcacaaatacgcccagacctcacgcccgagcacatgcttcatgtacacttccccagctacctcttgcagcccccaaggagactatgcattctgtcccccagacaaggggaccaagcccttgctgcccctgtagcctgctgcccaccttgtgcagtgggtgcagcccaaggcctggggcctatcccgggtgtgagtcctgccctgccactgagtgacaatgtgatctacaggtcacttggtctctcttggcctcagtttcctcatcaggacatggcgcatttgggggttccccgtcctaagaatgaactgagtacctcagcacccacaaagcacttgctgggtgacttgcctgtcacccttattaactcgtacacaagcaagggtgcccaccacactgaggcagggcttggcatggtccctgctggtcctcagtggtgtcatgtccagcgatgggtgggacaggaggccgacgttttctgaagctgttcggcgttggccggccccatgtccacatgtcattggtgcccagtaggcatttgcagaacggacagactgtggcgactgagactccagcatcctgggctgggggcggccagggccctgactgtcgtcctggccctctgacgtgagccatgtgctgtctgcttgcagcaggcaggatgtcggccgccactgtgctgtcccgggagccctacatgtgtgcacagtgcaagacggacttcacgtgccgctggcgggaggagaagagcggcgccatcatgtgtgagaactgcatgacaaccaaccagaagaaggcgctcaaggtggagcacaccagccggctgaaggccgcctttgtgaaggcgctgcagcaggaacaggagattgagcagcggctcctgcagcagggcacggcccctgcacaggccaaggccgagcccaccgctgccccacaccccgtgctgaagcaggtgagcctggcctgctgccggcagtgccgtccctaggaggcagaggccgttccgcgatccaccccacgcctgcgctgcaccgcctgattgttaactgcacgtctaaattgcagttaatggtggtgttgggcggcaaaaacactaatttgcagtttctttagactttgtagctctcacttgcaggctgccggctgacaagtactgcttgtcttcaaggtcttttctgaaagccacgttgagataccaaaggggcgtttggaaaaatgttcttgctaaatttggagaggaacaagtttgaaatcaagttttttgttctcgtgttgttttattttaatgcttctccttcccaccctcttgtagactcgaagctcccttttggcaatttttgttttcttggaagttctttgcaattcactaaacgcattttctcaagatccccacttggcgcctaaagtccccaggggacgggcctgtcctgtggggctcaccctcggtcaccctgggccggccagcggaccgcactgactttgctttcaacccccgtttgtgtaggtcataaaaccccggcgtaagttggcgttccgctcaggagaggcccgcgactggagtaacggggctgtgctacaggtcagaaccgcactgggcgccgggagcctcgcgcccccaccgcagcccgtgaccacgtcagtcgccgactgtcacgctgcctcttctgtctgtctctccctgtttctgtttcactctctcccctcccccacccctctgtgtaacttacctggtctcctgattttggactttagggaccccatgtgggtgggaagaggtcagccagagcaaggagaggctgcgctgagtgtctcgcctgctgctgtcttttccctgcatgagccgtcacccccctttctccactgcaggcctccagccagctgtcccggggttcggccacgacgccccgaggtgtcctgcacacgttcagtccgtcacccaaactgcagaactcagcctcggccacagccctggtcagcaggaccggcagacattctgagagaaccgtgagcgccggcaagggcagcgccacctccaactggaagaagacgcccctcagcacaggtgggtgacctccacagggctccccaggggacctgcccattgtggggttcacccttccttaaccgaaacagaggcacatgtgcagcgggtgaacccccaggcccgcttcccaagctcagcctcctcggactctggctttccctcttgcccctaaccaggataccctgaagaagtgacagccccgagcagataggaaatagtaaccaccctcactctctgcacccaggctcagtctttgaccgacaaaacatgggccaggcctggctcagagggtgcccccacagccatccatgtggactcttgtcagcacacacccctatcttgcccactcagggtcccccttttctctttgtgccgcagcaaacatcttttttctgtcattgtgccatccatgctgcggtcacactgagtggtgcaaagtagaacagtaatgcggggcagggggtgtgcccagggcagcggctggctcacccggggcaggtagtggaggccttgccggagacggtgtttgaagaacaaccagtgggggtgaaggtcctccagtgggctctccggagtcaggtgcggccccaccgtccctggcatggtcccgatggcctgtttattttttcatgtatgtgttaacattagaacaaaagtgttatatttcttgtgtcaaaaatagggaaagaaaaggtggtcaggaagggccaagttaaggagatgggcaccctctgggagaggaagcaaagtgtcccacatgcaccctgaagcctgtggccctgcaggtaggagaggacaatcatgagacaggccccaggcagagtggtggggggagcctgagagcctgctgagcctgccgctgtcctaagtgaggggcgtgcccaggtgccaggctctgcaggggcacttcaggaaacagcagacgttcggctgcagaggaatccaggcagcctggacagttgagtgtgtttgtcatcaaaccagccagccagacgttctgctcagcaggtttaagacagctgaggactcacgggctggtcagaaattactcttgtgggaagtttgaaaggataagaaagaagtagaagtcgataagtgtgtgcatgtgggcacggtggtggaagtcatctggaagctgtgtgtgtgtgtgtgtgtgtgtgtgtgtttaaagtttgaaagggagcatgaaggcatcactagttgtgtgtctgatggtaggattagagggaaaataaatagttgaaagcaccatttcctaaaagagttaccacgggggttttgagagagcgcctggcaggacccagttgccaggtttctggagtgctgcccttgcacacagggttggttcctaagaacatttgacctgggaacgctttttccacaaaatgtattagccaccactaaaaatactcttagggccagacatgctggctctcacctgtaatcccagcactttgtgaggccgagatgggaggattgcttgagcctaggagtttgagaccagcctgggcaacatggtgagaccttgtgtctacaaaaaaataattagccaagcacatggcatgtgtctgtggtcccagctactcagccaggaggctgagggaggaggatcgcttgagcatgggaggttgaggctgcagtgagcactgattgtgccactgcactccagccttggcaagagtgagaccccatctcaaggggtctggggcagcccttacctccaactctggccaaaaattctgcgtgtgctgggtgggggcatttatttattttccaattataaaaatgatatttgtccatcatggaaatttggaaaatacagagagaaaagactgtggcaatggcttgtattttcctcccccaggtgaacaaatattacatttaagggttttccccagtgtctccccttcacttgagggtcctttgtggaaatgtgtgtcttgcgttggctactttgtgtgttaatgagagacccttactggacgcattaaaatttgagctgggcacagtggctcgtgcctataatcccagtgctttgacaggccgaggtaggaggattgcttgaggcctggagtttgagaccagtaaacaacaacaacaacacttgagggtaggagatagtttttttttcctttttttttttttttttcttcttttggagaagcttcttgctatgttgcccaggctggaatgcagtagcgcgatcatagctctcttgcagcctggatctcctaggcccaagcaatcctcccacctcagcctctggagtaactgggactacagggatgtgccaccatgtccagctgatattttttttagagatggggcctcactatgttgcccaggctggtctctatctcctggcctcaagcagtcttcccaccccccagcctctcaaagtgctgggattctaggctgagcctccgtgcccagctaagatagtttttcattgctgcatagtattccatcctgcattattgtcctgttgcacacatttgtttatggttttccactgttctaagcagcaccgtggtcagcaccttcatttctgtagaacgtaggtagctgctcaccctctgatgattgccccacacttgggattaccttggcagagcctggcaatgtcaaggccattgagttgctgcctaaatactcttcagctctgggggggcctgggatttgaaacgttgattgaggagtagtgtgggtgggtttgcaagggctcctgggtccttagtctgtattggggctggggtctaggcagctatggctgggctcctcccaggagccctcctgacgagggccttctcagctggtcgctctgttctgttgcaggcgggacccttgcgtttgtcagcccaagcctggcggtgcacaagagctcctcggccgtggaccgccagcgagagtacctcctggacatgatcccaccccgctccatcccccagtcagccacgtggaaatagtgcgagccaggccccgtggaagacgggctccctcctcccccacctggcccctggtctagaaggacccactgcaccaccctccgctggctcgggaagacaccgtgcccgccccaagagcaagcaccggccatgctgcagaggcaagacctcaattcttggctgcaaagtttcatcagggctagggggctggtgccgcctcataggcagacgaggatcatcgctgggggacctttcccgtgggctttcttcctttctctctttgcctttagtttgcccgacaccagcagaaaagtggaccttgggggctggttctgctcctggcccccttgttcagcccctgccggcacacgggcggctcaccctggacactgtgatgcgcatgggcaaggccagcgcccggggcttctgaaccgagcggggtgtttcatttttttgcttttccctgtcttaggctcccagtctttgactgccttcccatggcgatctataagttgaaagattttttttttttttaatcacctcatgatgatggagttaaaagtaaaccgtgcagaccctggggtccctgttgtacgctgcatcatcccgctggccctgtgccctggagggtgggcggctcatggtgccacagcccctggcagggacggccggcccgcccccgtgactgactgacagatgcagggatggccgaggcagccctcgctccagctgaacgcctccattgctgcttgttctggagacccccgcccccgcaccttccagacttagcagaagaacaaactgaagaacagacccagccagagaagcagggattccagaagctgcccattaagggagaaggagaggatccggtcggcagcagccctgagcagaaagctggaggggggactgtcgcggggtttttctgttgtggtttattttattaaattttttccttttttctattcatttcgatggacgcaatcttaagccaccctggccttgctcctgggaggtgagcgtgcacaggtgtgtgcaggtcaggaggtgccgtccaggtgtgcggcgagccgctgcgcacagatgtcaggatttccgtttgggtctagtttagaacctgtccttaaacctaggggttgctgtcaggatttgctttcagactttttttttttttgtaattccctttagagtctacaaaaatgtttttaaaaggatcaggtctgcttttagtttcatttttgtttctttcccgtcccactctttaaaaactggttccgtgaggaaaggcagaagccgttccgtgtctcttgcaggctgggccggcttcatgccagtgcgagggcgtcccgtgcccacgtacatacgtatgtctccatgagttctgggctccactggttccaattgagctccagccctggttttcctacccatgcagttagggactttaatttaattttttttttgtagggccaccgccttcaaacacaactgctacaacattctaataaaggctcatttaacccccaggctcctgtcgtgtgaatatcctcagtctgtaggaaactttttttgacacagcatagaagacctagttttggaaaacattatctaattttttgttgtgcaaatccccaaatttctcactaatttttgtttttttgtgcataacttggatgggctgaaggaggtgaggacagattggggaagggtggctttcattccaagatccagggatttggggaaaaggaaggaatttgatgttttttggggtgggaggggagggtgtgttttttacaccaaaaaaaaaaaaaaaaatcaagagtatgcaagcatttctattcctcgcatttttctgtgtgcctggcaaataaatacctgtctcctacgaccctgagctgttagccctctctgttccatgacaggggccagatcttccagctcctcccagaaggagcacccaggctggcttcttcccactgaaagccctccccagcgaaccaacctcagttctatgcagtggctggggatcaggcatccagaccgaagtcacctctgcctgctccagcttgggtcagctgggtctgaccagggggccagatccgagccgcacctgccggcccccagccccagctccagctcctgacctctcccagcctggcctggctgttcctccagggctgatggctgtcaacccatccttgtgagttcatatggactgctgcccctcgaaagggagagggtcggccccatgtccccagggagcattccatcagggacaacgtacatactgtgatgtaaactttttttttttccccccagggggcaaaagtgtgagatgccttaatctttccttcatttctgctgtctcgaacactctagcccattatttcctttcagttccttgcagcataacctctacgataagccccaagcgggttgttgtattatgacgtttatgatgttccaggtgaaggcattattaagtacctctctgggtgtggggtttggacgcaccaggatagctattgattaatgttaagggtgttctacccacagcaaagcacaccctcttaaaccaggcactgcctgggtcctggtcccgagagccctaccaggatcaggttcctgcaagccgtcagaatgtgggagcccccagcccaactgattgtaactgtcccctgttacctgtgacatgaacctccaacagcacctggaaacggttccctctgtcagctgctctgtagacagggctggggagatctcagagttcacacctcgcctgttgtaggggaggttgggggtagggtttggaatggccaagtgcccttggaacctcccacagctatggccgtcctgacctcatcccaggaactctacggtgaccaggaaccacccctctgacgaggtctgtagcggcccttctcagagtggaacagcccacagtgctagttgtgcctggtcttacctgtactccacggacctcggtgaagcaaaagcttcagggcagagggaatgaggcaacccagtggcagccccgctgggccccgtggctcctgctctcctattggacgtagaggcaggggagagacttctctatacaaatattctcatcacagaagggatgatccttgctgctctgccgtagggtttttgatgctgagctatgctgcacatgacgttaacctaaagaacttggactgagcttttaaaaaaggacagcaaacaattttataatccttaaagtgtaatagacggttacactagtgcagggtattggggaggctctttgggtgtggaggctgtcacttgtatttattgtgactctaaatctttgatagtaaaacaaatgtaaaaagaaatgtttgccaccagatgggaatagaagttccaataagcaggctggaatgggtggctatacgttgtatcacgaggaagttttagactctgaaggataataaatggatgatgtgtcaactggacttttcttttgtcccttctgccctggcttctctgtattgtttcgtcctagcttcccaggcaggttggagggagatggaggatgacccttagttaatgagagaagcaaagggcggggtgcatctgctgctggggcctcacttactgtggggatggagtccccacggcccctctcctctggagctttgtggcaaacttaccccatgggctgggagagaggaatgagaatctcagtgggggctgggtttggtggctcacatttgtaatcccagcactttgagaggctgaggtgggtggatcacctgaggtcaggagttcgataccagcctggccaacatggtgaaaccccatctctactaaaaatacaaaaattggccggatgtggtggtgggtgcctgtaccccagctacttgggaggctgaggcaggagaatcgcatgaacccgggaggcagaggttgcagtgagccaagattgcgccactgcactatagcctgggtaagagaccgtgactttctcaaaaaaaaaaaaaaattctcagtggaatttgcttgtgtttgctgcatcagccttcacgctagagtggtgggttttcctggagcaattttcaggctgggggcctcgatggtgtctttgctgcaggatgtgatattacagatgtgcaatctaagcacagagtcaccaacctggatccaaaatgaacgacgtcctggcaaaaatgttttcaagtgttgatagtttcaagttttattcttaaggtgagacctgggatcattttgctgaattttaatgtgcataaaacatgaccctgttttcctaggtgctatttatttgaggcagggtctcactctgttgcccaggctggaatgcagtggcttgatctcagctcactgcagcctcaacctccctaggctcaggtgatcctcacatctcagactcctcagtagctgggactatgggcatgcaccaccatgcccagctaattttcgtattttttgcaaagacacatttttgccatgttgcccatggctggtcttgaactcctggactcaagcagtcctctcaccttggcctcccaaagtgctgggattacaggtgtgagtcaccacgcttggccgtttcttgtctttgaagcatccttgcctccggcctgggagctcataccttccccacaactcccaagtgcctggtcttatgggcacagagctggtagagaacatggtagaaactgaacctcagcctgtccagtagcgcgatcttggctcattgcaacctccgcctcccaggttctagcgattcttctgcctcagcctcccgagtagctgggattacaggtgccgccaccagcacgcccagttaattttcagtagagatggggtttcacgtgttggccaggctggtctcaaactcctgatgtgatccaccggtctcagcctcccaaagtactgggatgacaggcgtgagccactgcacccagccacttttttttttttttttttttgagataggctctctgttgcccaagctagagtgcctagaggctctctgttgcccaggctcaggcgatcctcccacctcagcctaccgtgtagctggggccagaggcttgctacaggcatttcttgcttggcctgagaaacattcctatggggtgctgtctcctgggcttggctcttggttcctcgtgaggctctgcttccctggattgggcacaggcttgtcagtgcagttggggcagattcaaggggcgggtcctgggtcatggtctcaaatagcctctccagctgagaaaatgggacactcccctcgtccctgacatcttgtccccgacatctcatcctctctgaattgagccttgggtctgtggccacatggcaggcagagaccctgaccccatctgctcccacagattcgtcggtggacagatggcatgcactatgccctgggccccggagatgtggcaggagctatccagacagaaacatatagcaccttgagaggagggcatggggtgacattttaggcaaggcttgaagaggggaaaagtgccaggagtgtgcaaaggcttggagataggagccagcatggcaggtcaagaacaaaaagggcaatgtggtgggactgggtgggaagacggggcaagggcgtgggttttagctaagtgcagtgggagtctagggaaggtcctgggcccagtactcaagctacgcccactctgaagccatgcccactaccccaaggatggggttttgcccattttccaagtggggagtctgaggcatggccccagtcaggagcagcacccttcgaataaaccagaggggctaggggctaggttttattttatttatttattttttcttttgaggcagagtcttgctctgctgcccaggctggagtgcattggtgggatcttggctcactgcatcctccattttccgggttcaagtgattctcctgactcaggctccccagtagctaggactacaggtgcaagccacccatgcccgactaaattttgtatttttagtagagatggggttttaccatgttagccaggctggtctcaaacgcctgacctcaagtgatccgcctcccaaagtgctgggattacaggtgtgagccaccatgcccggccccaggagctgggttttctacctccactctgatgtggtccagccaagactggaggctaggcactgcccctcttttagcctcggtttcctcatctgcaaaactgaaggggacagggccatgtatctatttggagggatgaagatagagctggcactgcatcaccagggcaccagaaagccattgagactgagtgagcaggggctgggcatggggagacccaccagaggagcagctatgtagggctcatatgcaggtaggcacgattaggatttcctaatatacctaatacatttccccatataccccaaatgggaaccactcccaggctctgtggggtcctctctcaatttcctccttaccttgccatctcctttccctctctccctccttattccaggcaaataagcttactggccttactcaaacacgccagctcccctcttcctggggaacaacctggactgtttctcttaccttcagagtcccttgactttttttttttttttttttttctgagacagggtctcactctgtggtccaggctggagtgcagtggcacgatcatagctcactgcagccttgaactcccaggcccaagcgattctcccacctcaccctcccaagtaactgagacacaccaccatgcctggctaatttttaaattttttgtacagatggccgtctcgctgtgttgcccagattggtctttaactcctgggctcaagcgatccgcccacctcagcttcccaaagttctggaattataggcgtgagctgccacgccctgcccagagtccctccttgaacacctcccaactctacctggcatttagcacaacttacaattattttatttccatgtcattcttttattttacttgacttttcaattgtctcgttttcggcagggatgggcccaagtctcttcgccatgagctctggggcctggcagacagtaggtgctcaagaaatgcatgactacatgaaggaacagaggaaggaacgagctagtgagtccagctgaatctcgcccagccccgccctgactcccccaccccctcttcccgagaggaaagggacccacagcagggagggcttcccccacccccgcaacgtcactgttgctagatctgggttcaaattacagctgtgagccgggtgaagtggctcatgcctgtaactccagcactttggggaggtcgaggcaggtggatcgcctgaggtcaggagttcgagaccagcctggccaacatggtgaaaccctgtctccactaaaaatacaaaaaattagccaggcgtggttgcctgcgcctgtagtctcagctactcaggaggcagaggcatgagaattgcttgaacccgggtagagactgcagtgagccaagatcgtgccactccagcctgggcaacaaagagagaccttgtcctaaaaaaaaaaaaaaaaaaaaaaaaaaaaaatcacagctgtgtcttttttgtttgttttttgagacggagtttcgctcttgttgcccacggtggactgcagtgacacgatctcggctcactgcaacctccccctcccgggttcaagcgattcttccgcctcagcctccgagtagctgagattacaggcgcccgcccccgtgcccagctaaattttttttgtatttttagtagagacggggtttcactatattggccaggctggtctcgaactcctgacctcaggtgatccacccgccttggcctcccgaagtgctgggattacaggcgtgagcaccgcgcccggggtttttctttttctttcttttttcttttccttttttttttttttttttttttttaagaggcagggtccagggcgcgttggctcacgcctgtaatcccaacactttgagaggccgaggcgggtggatcacgaagtcaggagttcaagaccagcctggccaagatggtgaaaccccgtctctactaaaaatacaaaaattagccgggtggggggacacgcgcctgtagtcccagctacttgggaggctaaggcgggagaatcgcttgaacccgggaggcggaggttgcagtgagccgagatcgtgccactgcactccagcttgggcgacagagcgagactctgtctcaaaaaacaaacaaacaaacaaacaaacaaacaagagatgaggtctcggctgtgatgcccaggctgttttcgaactcctgacctcaagatatctgcccgcttcggactcgcagtgttggggttacaggcgtgagccaccgcgcctggcccttggctctgccttttggcaagtgacatccatgtgggcctcagtttccttatctataaactcctactttacgtggagacaggccaccctcgccccacccctggctgttccattcttaaaagatgtggacggcgaggcgctggggtccacttgcttcccagcccatcatcacagcgacatcacgacccggggacaacaaagctcctttgagtttgcccatactggggagctcaaaaggtccaggctcgaatcctcccgactcccttttgagtcttggagcaataacctcaacatgcgtgactctaaaatagggtacccgcgcctgccttccccggatggagcgatcgcttctccactagtccgcaaatgggggccaccgttagagccaggtgcgaggaacagcgagtttattgcaggttccaaccgggaacctggcacccacggctggttgggaagggacgccctccgcgcagaggctgagagttccgcgcaggcgcaatgcttccgtcccctctggtctcgccctctcggggcctggtcgcagggaatcgcggatgcgcatgcgcctccagctcccgggatcgcggggaacgtggattccgaacaagggcaactgcggactcccccgtgggaagaaagggagggaagcggaagggaaaaagcgcatgtgcagcagcacgcggcagcttcgcatattccctcgaagcgcgcctcttgcgcgtgcgccgccctggcccagtgcccttggctgcaggaatggctggaaccacccggcttctagccggagtccccggcgcgcagccagcagttgcgcgctacctggcccgcggagggcctggcggacgggctgaactgcagcagctcggcgatcagggccttgcagcgctcggacagctcgaggccttcgggatagagcacgccgcgtttctggcgccggggcaggccggcgatgtccgagtcgtcgaagggcatgcacccggtgaccatgacgtagagcacgacgcccatgctccacacatcgtacttcttggggtcgtaggggatgcccaggagcacctcgggtgacgcgtaggcggctgagccgcagtaggtggtgctcaggtctgggtagccatgggcctggcggccgaagccgaagtcggtgagcttgacgcggcgctcgtccgggctcagcagcacgttttcgcacttgaggtcgcggtgcaccaggtgatgatcgtgcaggtagcgcacggcgccggcgatctgcgcaaagaggtcgcgcgcctgaactccggggatgcgcccgttgcgctgcacggcttgcagcaggtcggtggcggccgcttccatcacgatgtacagtttcccgttgcacacctcgatgaactcgaagacgtgcacgatgtgcgggtgtcgcacgccccgcaggatggacagctctcgcggcaggaacttgttgacgaagtccgggggcgctcgccgccggtccaccaccttgatggccacggtacccttgtacttcttggatgtggccaccttcaccttggagtagctgccctctccaattgtgcggcccagcttataaccgagttcgctcagaagtttgtctcccgacatggtggcgcctagggcgcacggggggcaggaggcggctgctgtcggggggcggccggactccaatctcgggtctaagccatggcgcttggcacctacacccccgcacccccatgtgcccactgccagacattggccgctgttgtgccttttattgccccgtaacaatttttgccttgtgaagtgactgcgggcgtcactccgccttagggtgggggtccgggaccccgccccggggccaccctagcctccctgctttgtgactcataatcatcctgaatggtcagtttccgatgagaggccactagcaagggatacccatcaccaccagggagcagaatccgttccagggattggggtgagtccgacttcgagcagcagctgccccccaacatcatgtacccagcccgtgactacgtggagccctgggcttcgcgtagagtccctagacggggcgaaaacgggaaaaggggccttaactggggcacctggctcctttgagagctcggagtttctgactggcctgcgcaacaccccagaggcaaggtgaacgcgagggcctataatgcaagaaccaaggcgagtcacgccctgtctgggcaaaagaggagtaaagacccctcagctgcagcccggcagcgcattcctacccagggtccgccgccagagctttcccgcgcggtcggatagttacactactgtccgggacttcctagccgtgccgcggaccatctcaagtgcttccgccacactcatcatggcggtggcagtaagtcacttccgcccgggaccggaagtgtgggatactgcgagtatggcggcgtcaaaggtgaagcaggacatgcctccgccggggggctatgggcccatcgactacaaacggaacttgccgcgtcgaggactgtcgggtcagtatcactctgcgccggggtctcagagtctgggcactcggggctcgggggcggggttccggggacacaggcgggcctcagttttcccggcggtgtgaccggaggcggagcccggggatccatcatagcttctgtaataacgctaagtgctgcagtttgttgaggtctttcccagctcctcttccttctcgtaacagcccaggaaatcggtccctctagttatttacgttttacagtgggttaaactgagtcatagcctgtgctctggccctcagccacccttggatttctaagatggggaaactgaggcccaaagaaggccgcggctccccaaggcaaagctgaggccgcaacccggaacctggagggaatttacaagatgttctatgcagtggttccctgctggcagcccccgcctgcatggtgtcacaggaatccatattctttaaattttcaattttttttttttgagacggagttttgctcttgttgcccaggctggagtgcaatggcgccatctcggctcaccgcaacctccgcctcctgggttcaagcgattctcttgcctcagcctcctgagtagctgggattacaggcatgtgccacaacgcctggctaactttgtgtttttagtagagacggggtttctccatgttggtcagggtggtctcgaactcccaacctcggatgatccgcccacctcggcctcccaaagtgctgggattacaggcgtgagccaccatgcccggcgtaaagttttcaaatgtttaagtaacacgttaaattttgttatcgggctcagcacagaaaattgaaaaagagaacttaaaaggcgcccatactcagtccccaggttaacagacaaatagaaacttttaaacgtaatctaagagtgaatacatacatttctttttttttttttaagacggtatggttctgttgcctgggctggagtgatttcttggcaacctccgcctcctgggctcaagccatcctcccaccccagcctcctgagaagctgggattacaagcatgcgcccagctttctgtattttctatagagatgggatctcgccatcttgcccaggctggtctcgaagtcctgggctcaagtgatccacccacctcggcttcccaaagtgatgggactatcggcatgagctaccgtgctcggcagaatgcatgtctcttaacaaatcaaactttacatttaaattacatgttatgcacattattcctcaattttaacacacacacaaaaatgagcatggtaattaaaaacgtaataattcagacagtagaaaaatcagtgtgaggtgaaaagtcctccccagccccttcttggtttttttattttttatttctactttttgtagagacagggtgcagctatgttgaccaggctggtctcaaactcctgggctcaagtgatcctccagcctcagcctcccaaagtgctggaattacaggcatgagccaccgcggccaacctcctcttgtttttcttgtatcccagaactgagattggcagactttttctataaaagggacagatgacaagtattttgggtttggctggccagaaagtttcagttactgagacaaccatttacaaatggaaagtgttcttagcctgggggctctacaaaaacagattgcctgtgagccaggtggctcatgcctgtaatccccacactttgggaggctgaagcgggaggatggcttgagcccaggagtttgtgaccagcctgggcaacatagtgagacccccacctctaccaaaaattaaaaaaaaaaaaaagaggcttcaggctagatctggcccatgagtgctgtcccagaacacattggaggaatataatgcattctatttcctcatttttcttttttcttttctttctttcttttttattttttgagacagagtctcattctgtcacccaggctagagtgcagtggcccgatcttggctcactgcaacctccacctcctgggttcaagcaattctcctgtctcagcctcccgagtagctgggagtacagttggatgccaccacatccggctaatttttgtatttttagtagagatggggtttcaccatattggtcagactggtctcgaactcctgacctcaggttatccacccacctcggcctcccaaagtgctaatattgcaggcacgacccaccacgcctggcgttgtttgttttttggttgttgttttttgtgtgtgtgttttttttttttagaccaggtcttgctctgtcacccaggctggagtgcagtggcgtgatctcggctcactgcaacctgtgcctcccaggttcaagcgattctcctccctcggcctccctagtatctgggattacaggtgggcgccaccatgccctgcgatttttttttttttttttttttttttttttgagatggagttttcacttttattgcccaggctagagtgcaatggtgcaatcttggctcaccgcaacctctgcctcccaggtttaagcgattctcctgtctcagcctcccgaatagctaggattacaggcatgtgccaccatgcacagctaattttttgtatttttagtagagatggggtttctccatgttggtcaggctggtctcaaactcctgacctcagatgatctgcccgccttggtctcccaaagtggtgggattacaggtgtgagccactgggcccggcctatttttttttttttttttgtatttttagtagtgacagggtttcaccatgtaggccaggctggtctcgaactcctgacctcaggtggtccccctgcctcagccgcccaaagtgctggtattacaggcatgagccaccacgcctggccgagtctcattcttctccggtgtaacctgggctaccccaccccttcaggtgtgcagcacaaggtctgtttccaaatatgcacctgtgtgacctgcagccagaccaggccacagaaggacctcaggcctggaggctccctgagctccctgcttccagcatctcatttttgtataaataccctggtcctctcccagttcaccacagagcagtggccccccctgtgccagacagtgccctaaataccactgcctggggttgtgtctcctaatggtgtggacttttgttacagcacatacacacccaccccagcctttcccggtggaggagtgaggaggatacccctatgctggtgtgctctttgtttatggccctgctttcattgttgagtgagcacatggttccgggccctgtccccaagcgctcacagctgagctgaagagatacaacacatcatgccaggatttctagttgttggtgaggcctgggataacctgggcccacttaagccaggatgtgccaggaggacctctgagaagaagcctgctctgcagaaaaagagcaaacacacaggccctgcctcctctccctctgtcctcctctcctgcctctcctgagccatggtccacagtggccttcccaccagacctaccttctgtgctcctgtccaaggcctggtggccccaagcctggcacccactcccttctgtctgcctgggtcagccattcactcactgccagcgtcccaggacatgatgggctggctcaggctgctttttgttctctttttttttttttttttttttgagacagagtcttgttctgtcactcaggctggagtgcagtggcgcgatctcagctcactgcaaggatggtctcgatctcctgacctcatgatccacctacctcaacctcccaaagtgctgggattacaggcatgagccactgcgcccggctggctcaggccccttttaatccatgccgcttctgaagtgacttcaccccacctcctccactatctcccacacccagttctcctgtccccactccctcctgagcctagcaggcagccctttccttttcatcttgtgtctttaatatatttattgaggttccaataccataccacacaactcacccatttaaagtctgtccaatttaatggctgtgagcggtggctcatgcctgtaatctcagccctttgaggacaaagcggatggatcacctgagctcaggagttggagaccaacctggccaacatggcaaaaccctgtctctactaaaaatacaaaagttagtcgggtatggtggtgcacacctgtaatcccagctacttgggaggctcaagcaggagaatcgcttgaacctggaaggcggaggttgcagtgagccaagatcttgcctctgcactccagcctgggcaacagagtaagactccatctcaaaaaaaataataataatatagtgaagtgtgtccaatttattgattttttagtatattcacaaagttgtatggccattgccatgatcagaatttagaccactttcattacccaaaagaaaccccgtcttccctattagcaatcatcccacccctggcaaacactaatctgcttccttctctgtggatttgcctgttctggccatttcctatcagtgaagtcatagaccgtgtggccttttgtttctggcaaattaatatccagcaccaagtgttgtgttttcattttttgatgggcacttgggtcatccacctactctttggctgctgtgaataatgtgagtatggctgccatgaagattcatgctgtacaggtgtttgtatggatgtagattttcatttttcccttgtgaactttcccctaagagagaaaccactggatcatatggtaacttcgtgtttaacattttgaggaactgccaaattgttttccaaattggctgcaccattttgtgcttccacctgcaatgtatgagagtcccaatttctccacgtctcaacaacactgattattttccatttttttgatcatagccaccatcctagcgcatgtgaagcggtatttcattatggtggagttttttaaaattctttttgggtctttttttgctcagttttctggtcattgatcgttgatttgcatatcactgctggctgatgatgtcgaacattttttcatgtgttttattatttttattttttattatttttttcaagagatggggcctcagtgtttcccaggctggtgtcgaactcctgggctcaagctgtcctcccgcctcagcctctcaaagtgctgagattctaggagtgaaccaccacctttgcatgtgtttattggccatttgtatgtctgtctgtgagaaacgtctattcaaatcctttatatatttttagtagggttttttgtttgtttgttcgtttgtttgttttgagatggagtcttgctctgtcgcccgggctggagtgtagtggcacgatctctgctcactgcaagctccgcctcccgggttcacgccattctcctgcctcagcttcccgagtagctgggacttcaggcacctgccactgcgcccggctaattttttgcatttttagtagagacggggtttcactgtgttagccaggatcgtctcgatctcctgacctcgtgatccgcccgcctcggcctcccaaagtgctgggattacaggtgtgagccactgcgcccggcttagtagggttttttaaattattgaattattgagttgtaagattgtgtatacatatgttgtcttctcagctaattgatagtttcatttacagcacaaaagtttttaatttcaataaagtccgggctgggcacggtggctcatgcctgtaattccagcactttggggggcagaggcaggtggatcacttgaggtcaggagtttgagaccagcctggccaatatggcaaaaccccatctctactaaaaatacaaaaattagctgggcgcggtggcgggcacctgtagtcccagctactcaggaggctgaggcaggagaatggcgtgaacccgggaggcggagcttgcagtgagccgagattgtgccactgcacttcagcctgggccacagagtgagactccatctcaaaaatacatgtataataataatttcaatgaagtccaatttctgtatttttccttttgtcacttgtgcttctggtgtcatatctaagaaacctagtttgaggtcacagagagtgacttacattttcttctaagagtattatagtttcagctcttacgcttaggtctttgatcctttttttttttttttttttgagatggagccttgctctgtcacacaggctggagtgcagtggcgcgatctaggctcactgcaagctccgcctcccgggttcacgccattctcctgcctcagcctcctgagtagcggggactacaagtgccagccaccacgcccggctaattttttgtatttttagtagagacagggtttcaccgtgttagccaggatggtctcgatctcctgacctcgtgatccgcctgccttggcctcccaaagtgctagaattacaggcgtgagccactgcgcccggcaggtctttgatccttttgagttaatttttgtggatggtataaagaaggaacgcatcctcattctttagcatgtggctgtctggttatcccatttgttgaaaagactgttttctctcccattgaattatcttggcacctttgtccaaaatcaattgaccataaatgtgagggtttatttctggactctcagttctgttccattgatgaacatctctgtcctatgccagtgccacactgtcttgtacacacagctgtgggataagttttgaaatactgaagtgtgagtctttcaactttgttctttttcaaaattgttttggctgttctggtcccttgcatttccatatgaatttcccaacctgcttgtcagtttctgcaacaggaaaagaaatggttgggattctgatggggattgcgtttcaaatctgtatcagtttgcacagcgttgccatctgcacaatgctaagtgctccaattcttgaacacaggatgggtttttatttattttggtcttctcttaagaatggccaaggccgggctcagtggctcatactggtagtcccaacactctgggaggctgaggtgggaggattgcttgaggccaggagttcaagaccagcctgggcaacatagcaagaccctgtttctatgaaaaatatatttttcttttttttttgtttttgtttttggttttgttttctgaaacaaagttttctctgtcacctaggctggagtacagtggtgccatctcagcccactgcaaccttgacttcttgggcttaagtgatactcccacttcagccacccaagtaggtgggaccacagatacgtgccaccacatctagctaatttaaaaatatgtattttgggccgggcatggtggctcatgcctgtaatcctagcactttgggaggccgaggaagatggatttacctgaggttgggagttccagaccagcctggccaacatggtgaaacctcgtctctactaaaaaatacaaaaatttagctgggcacagtggcgtgcacctgtaattccagctattcaggaagctgaggcaggaaaatcacttgaacctgggaggcggaggttgcagtgggctgagatcgcaccactgcactttagcctgggctacagagcgagactttgtctcaaaaaataaaataaaatacgtattttgtaaatgtttcactgtgttgcacaggctagttgcaaactcctagtcaagtgatcctctcacctcagcctcccaaaatgctgggattacaagcgtgagccgaaaaaatttgatcccaccactgcactccagcctggacaacagagagaggcccggtctccaaaaccaaaaacaaaaagaatggtccacacacccttttgtgcgtgcccctcaccatgttccccaccagactagcagttcctaaggcacagactctgaggcctggggccttggcccccctgtggttggcgaggaggaagagccctgtgcaggctgcatgcaaatacaagaggccctgcattgtttctgtcatctcatacatctctgttctatgccagtgccacgctgtcttgtacacacagctgtgggataagttttggaatttatttcttctttggaatttatcttacagatgggcctgcgtatgagtgcgcaggtgtgagggtgcaggttctccccaagggcccattttctgcaccagaaggctgagggcagcccaggtctgtcccctgggttctctgtagccgtggaaaataatgagatatggccgggcacggtggctcacgcctgtaatgccagcacttgcaggtggatcatgaggtcaggaggtcgtaaccagcctggccaatatggtgaaaccctgtctctactaaaaatacaaaaattagcctggcgtggtggtgggcgcctgtagtcccaactactccggaggctgaggtggaagaatcgcttgaacccaggaggcagaggttgcagtgagccaagatcttgccactgcaccccagccagggcaacagagtgagattccgtctcaaaaataaattaattaaaaaaaagaaaagaacgagatatgaccagcctgggcaatatagcaagaccccatctgtacaaaaattagttaactggacatggcacacacctggggtcccagttactcgggaggctaaagtggaaggatcacttgaacccaggagttggaggctgcattgagccatgattgcgcccctgcactccagcctgggtagcagagtgagaccttgtctcaaaaccaaaaaccaaaaaaggaaaaaaaaatgaacaaggcagctgatgaaacctcccatgtgctagacaggaggctgagagctgggagctggccctgagcaccctgggcctctccagagatgtgcctctgagcccggacccagcacaccctcattacctgtagtatggaaatgtcttagccctgacttgggcttctaacaggttaaataaccaggtacaaatttgagccagtttctcatttatctccgggtctagcagaggtgcccccgtgagctccatgctggagcagagctgaaggcagaagagcatgacaggtgcagagcagggcccggcaggcacagagtagccccagcaggcatagagcagggccagtgccctggaggcctggagatggccttgccttccacctgctggtcatttcctgggtgttgactggagcctggcctacctgagcttttcattcatcccaccaagtgcaaagcctgtccagagaagagactggggctggaaggatctggagggtgcagggtgagcctgggagccagatcccagacagcccaggcctctctgaagatcccagtgggcccccagcctgtcagtcaggattagagcaaggccccactggtgctcagtaaatattcatgatggcctaggtccttcctggggtgcagggcagggggcttcaccctgcagagccaagaggtagcacggccacccctagagtccggggggtggctgggcagcccccacagggcactgcctgtccctggcagctgtgtgcagcccccgcagggcagcacgcggaactgtggcccaggtggccgggagccaccatggacactgtcagaactgcccttccacttcagggccagcctgccgcccagggtccaaacagccttctagaacacgatggacctggggcccccctagcaaccaccatctagaccctcaggcctcctgaggttgctgcctggcttgtacctttcagaaaacccctggcatgggggcagaggtgtcacagtccaagcagcctcactcctgagaagccgccagtgtcccctgattgcagagtgggcagcgcctggagctgtggaggagggtgtctgggggcgggctggcccgctgagcagcgcctctcttcacaggctacagcatgctggccatagggattggaaccctgatctacgggcactggagcataatgaagtggaaccgtgagcgcaggtagggcccctggtgggcgttgtctgaaagtgcccccccggcgagttgtcggggtcctgtagcattccgctgttgtctgtgctggcgaggggtgaacgggccccttggacttggctgtgcaatcccaggccccagaaagtgcagatccagacccagcacttccacttctaggctctgtcctcgagatgtctccatgtctgcaatcccagcactttgggaggccaaggtgggagcattgcttgagcccaggagttcaagaccagcctgggcaacagagggaaaccctgtcctcgccaccccaaaaaatgtgtctagtgaggagggttgggacccgtggatccagattaggacaggatatgagtggggggcctgcctcgggccctctaagcaggattttgtcagaggtgaccaggctcaaaccagaccacaccaggcagtggacacacagggccagatgaactagggccaggcgcccccctctccctgtgtcacaggctgggcactccttccccacccctcccccaaccccaacgcaggccaggcaggactgggagatgggggtcattgcagggaacttggaaactgccagaaagcagggagaagaaaggaaagattgtggccccgcctgccccagcctcacacactgattattttgagatgaaggggacgtggttttgtgaggcccagagccccgtgatgaagtcaccccctcttcgtcgcgatcatcaggcagagttatttttaggataaaaaaagtttttaattgaaaagaaagtagaaagccaacagtcttgtgggcagtcacccgtgcagctgcctgcacccgccctcctctcaggctcctggtgggctctgcccacagcccttgcccttcccgcgaccctcgccctgccccctgcctgcctccccgcccccctccgcctcttcccccagcagcaccctggcccctgaggtctgtgctgcctgtgctcccccgacctagcctggtctgacctgagtgtgggtttcgggctttcacaggcgcctacaaatcgaggacttcgaggctcgcatcgcgctgttgccactgttacaggcagaaaccgaccggaggtagcaccgcaggggccaaggttgggaggtcactggccggaaggccccaggctgcagggcctgacctgcatccccgaaggtggccagaatgcacgtgggggccatcgccctgtgccgtcagctgcatcctcaggcgtggagacttagtggagacccaagggggcgaaccggaaggcttcctggaggaggaggcagcactggggttggggcaagagaaaagctaggagttggctgggggaaaaggagacagggtcggagggaggcttgaaggggtgctactaggggccctaggcaggggcccctcagggcactgaggccccacccccaccatcggccccatccccacaggaccttgcagatgcttcgggagaacctggaggaggaggccatcatcatgaaggacgtgcccgactggaaggtgggtcccggctgggagggcagaggtgccagccacggcagagacagggcctggggttggggagctcccacagctttctatagaaaccccaggaccaagggggtggtgggtgccaggtcccacaagggaaggctgtagcgcctgccacgcacaggggccactgatcctgggggatgggtcctagcaggctgtatatgggtggctgtgcctctacccataccccactgtccccacaggtgggggagtctgtgttccacacaacccgctgggtgccccccttgatcggggagctgtacgggctgcgcaccacagaggaggctctccatgccagccacggcttcatgtggtacacgtaggccctgtgccctccggccacctggatccctgcccctccccactgggacggaataaatgctctgcagacctggcctgcctgttttcctggggactgggggaaagaagggggagagggcccagctaggcaccaccggatcacatgtagcatggggacgcagcagatatgcacagggtgacctcaaaacacacctaggggctgcccctggatccactggcggcctcctctctgcctccgatatacctggactctcctgcctcccttttgaaaccatgcctgtcagcagcccacttacctctccaggctgggggcccctgggtcagctttgggtcagaccttctccacggaggtctggagagtggggggagccttgacctcccggatacaagtgatcctcccgcctcagcctcccgtgtcactgcgattacaggattacaggcgtgagccaccataccttgtgcagccctgccaattgtaggcatggcgagggtatttgtctgcggaggggctcctcgctccctgagagggaagctcagagacacggggatatctgcagggaaagtaagtcgggggaagcaaccaagattggccaggtgcctctgctgtgggctcctggcacgaaagggtgaagtccgtctgagtccaccgaccaatggtgacgcgcagcgccttcgcggcgcttcctgattggcgggcatgcagggtgggcgggagggaggagaagagggggcgtcccctccctccacggatgcgcttaaaaggcggtggcggtggcggcagcgcccggcgcccgggctcacctcggccatgagcagcgcagccggcccagacccgtcggaggcgcccgaagagcggcatttcctcaggtcagctggggagagggaagctggagacgggcatggttcccatggggccaggagcagcccgtaggaccggaggcagggtcatagctgggacagaatggggtccggggactggagacgggcacagccgggatggaggttcaacggcagaggcatgaccacggtggggaaccggaggcagggatatggccaagacgggcctgggaatcccgggaatccgagaccctcctggcatcttgctggagacactaagctgcgttgctggggaaactgcctccggggcagcccgcccctcatgaatgattcatcagcagcgctggtcgctcccccaccgaaccccaaccgtggcccacccccactctccatctctcccagggccttggagctgcagcccccacttgccgacatgggaagagcggagcttagctcaaatgctaccacctcccttgtccagaggaggaaacaggcctggggaaggcagtcatggctagagcagatttggaacgcagggcctgtttgccagaggttggtgagtttgggatctagaactggcgccgtggctgtgactctcacctcatcctcctcagcctttgtgacatgggaccccaggcaaggctgttgacctcactgtgaaccagatgcgtccaacagctcctgcccactgcccacctagcagggcacgtgtcccctcagccgatgtccagactcagtctagggaagagtgttttaggagctgtgacttcaccttggggtgaaggggtgaggtgaggggggcctcaaatgctaagtgaggggagtgagggggctctcaggggtgggtaggagctagaacgtagtggggaactggctgacgaggctggagacacagaagggcctcttaggcatggtgaggagtttggagtttgaatgttcccagagccctcgggagccatcagcaggtttgggacccggtgatgcaatctggtgttcgagttttcaaagcccccccaggctcatgttgagttttgggggcaggaggctgctgtgtgcggccaggtgatcccccgtggtggtctggtgggcagaggtgtgaggtggagagaagcaggtaggactgagagcagggtgagtgtggcatggccaccctggcctgaggtttcacctcccagaaagccccctcctggaagcatttggcgagtgtcaggcccagttccctttggacccaggccacttcaggcctcctgggtctgacagggaaatccttggggccttgaagcttctctcatctaggggccgagattcgggatagcaaaaggcaccactgaacacccccagaatcccacaacagcagaagggacctgccctgcctgccaccctccttcaccaggctccaattcccacgcagcctcccacccccaccccacagctgctgctgtgccccacccccaggttcctaacctggacgaccctctgcccacagagcccccattattctaatgaccagttagacaggaagagaatgttccaagtggctgctagaggccaaagctttgggacagaagaagaggaatgcatcgccctcccgccctccacttcctccctgcaccctcctgcgggggcagcagtcagagctgtcacaagatggaggtggaggaatgagccatgttcccagcctgccagattcctcaccccgaatgcaaacgcacctcctatgtgctttcctgggagctgcgctggcctgccccggggggactctgtctgacttcaccatgagctccttttcctcaccccgtccttcaacttcatcctatgtcagctgcagacaggctgaggtttgaatttggctctgtttactggggtgtcccagggcatgtgactttcctgccctgagtctctgtctccgtctttatgtgtggacccccgaagtgtcctcttcaccatgttcctcagtctgggatttgaggctctgcctgccctgtccgcttgatcactctgcttcagcctcccttctgccccttgaacataccaggctcctccccaccccagggccttggcttttgctattcttgcccctgcattacctgccacgatgtgccaggcctcctcctccaggaagccctcgctgactcccatcccatagcagtcctccttctcctgcactctgcctacctggccttatcatgctgcaaaattggccagagggcagacatctcccactcagagagttgaaggaaagagtctcaggattcatcccctcaaaacatccaccatctgtaggtctggctctatgtctttgttcatgtcctgtggctctggagacaccaagggggaaagacccagtttcccaacttgcttcctgcatgatcctgggcaagccactcggcttctctgaatcattagttgtttttccaacttttctaggcctggctctttttatttatgtttgtgttttttattattatcttagagacaaggtcttgttctgtcgcccaggctagagtgcagtggcgtgatcatagctcactgcagcctccacctcccagattgaagtgatcctcctgcctcagcctcctgggtcaccgggattacaggtgtccaccaccacgcccagcctagtctgaccaattgtgtaggtcacccgaatattcagttttgctccgagaggtggagacggaccccagtcattcagtgaagtggatggcagagcttcacctccagctaagtagccacattttctggcaacaaataaccttttttttttttttttttttttttttttttggagacggagcctcactctgtcacccgggctggagtgcagtggcacgatctcggctcactgcaacctctgccacccgggttcaagcgattctccaggttcaagccttagcctcctgagtagctcgtactgcaggcacccaccaccatgcctggctaattttttgtatttttagtagaaacagggtttcaccatgttgggcaggctggtctggaactcctgacctcaagtgatccacccgcctcatcctcctgaagtgctgggattacggatgtgaggcaccgcgcccggcctggccacaaataatctaattatgtcactgcccctgaaaatcggtcaccaaagggtctcatagccccaggccccaaggcctccccgctgagtgtgccatcaaacactgcagccttaaaaacccatggaccccagatgcccccagtcctgtccacccctttcagcgtcctgaagcttgttccgtggctcccactgcctgaaatcagcccatcgcccccatcgaagtccttcatgctccattcccctttcttggttccctccgccttgggagctggggacgtctaggtccggttccgtgtcccacgctttggagcagtagaaccaacgcgcggccagcgcatcttctgccaccagagggcgcccgcgcctcgggctttggctcccacaccgcggcccgccaggcctcgattcaacccgcgcgtcgcacggtgaaactgagggcatccccagctcaaggctgcagacgctactcgggggtacggggtgggagggtggcattgggaccgggttcagaagcttggcggaacatttctggctccatctgaggctctgtctctgtgtgtctctgagtgtcccatcccactctgtccccagcaccgcggaggcagccgccctggagcgggagctgctggaggattatcgctttgggcggcagcagctcgtggagctgtgcggtcatgctagtgccgtggctgtgaccaaggtacctgacccctgacccccaaccctgaccccaaccagacggccaactctcctgagctgcatgactgctgtgaccagggtggttcacccctcaagaactccctttttgcttgggcctaccccagcctgatgggtaaactgaggcccagagaggctcatggctggtgcaggccagatggggacctgagacccctggtatcagagaaggccagggtggaggttattgcagggacagtgccacgaccctggaagtgcaacccctcctgcacatgtgacccgcctgcttctgccacctcctgggtcttgggcaccagggacatctgctcctgcgatctgaacacccctaaacaaccctgttctgcaggtggggaaactgaagctcagaggtggcgaggggcctgccctgggtcagagggggatggaagcagagctgcaacccaggtgtgtctggctctggagtaaacccccacacctcgaggggccaggaggatgacacaagggtgatagcaataatcatactatggagtgcttcaccgtgcagccagcagtgctgggcatcagtttcctctgcaacagcataataaatggtactgacgagtcagtccctaaacgtgaacgcctcagaaaactgtcccatacagtcgaggctctagcgtgactgcctcctcttcctcccctgccctcctcatccccctcgcctttctcctccttcctcctcctcctgccccctcctcttaccctcctcctcctttctctctccctcctcctccccttccgcccctttcttctctcctttctccttcctctccctcctcctccccctcctcctgttctccttcctccttcccacttaccctacctcctccccatcctcctcctccccattctctccctcctcacccctcctcctctttttcttcttattaccacggtatactttttaaaaactcaatgtttttcttcatgtggacttaaatgtttgtatttccaaatgaaatagatcccgggtgaggcgcccaaaggagaaggaaaatcaaaaccccagaaagaaacccagtagtcactactcgcctggcgctcagtggccaactgtctggtttttgcactgaaagccccttgtctgtccagaagcccctcagtcccagtcttgggtcttgggctctgggcccggtgtggctgggatcgcaggcatgttcatggcaggtcaggactgcgctaagcctttggggaggatacttgaaaggggagtaatctgctgtctgtgtggttggagcttaaagtacagctggggctcaagagacacccagagtgcctgtcaggcggtggcactgtcatcgcatttgataaaggccaaactgagtctgggagagaaggggctggggccacgcagaatcagggcagggctggggccaaaatgcctggagagacagagtctgagagatacagagatggccagagacagatggagagagacagataacagagagatacagagacagccagagacaaatggagagagagacaaatggagaaagagagccagagacatacagaaagacagagacactagagtctgagagatacagacagacacagagacagccagagacagatggagagagacagagacacaaagagagccagagacacagagagtctgagagatacagacagacacagagacggccagagacggagagagacagagacagacagacagagacacagagagtctgagagatacagaaacagccagagacaggtggggagagagacatgaagagagccagagacatacagagagacagagacacacagagagacagagacacggagagtctgagagatacagagagacacagagacagccagagagagacagagaggccccagggcatcgtggctaaggttgggctcccctactccacagcctccaggaggggctgaggtctggaaacatgggcgggggtgggcccgcggtgagaaaggtggaagaatgtctgcaactcaggcggagaataaacaaaccgcactccgggcgacgggcagtggctggatgcacgtttttcctgcaccgacctggcagagcctgagaccgggcctctgcatctccagcggggaaactgaggccccaagaggcccaacccctcatccagaacagctcacctcctgtcctatcctgttgcctccaggcccaagccccatcccttcccctactccgggcctcagtttcctctccaggcaaggaggaatctggactgtgcctgtgcctttgctgtgtcccctaccaccaggcgttcccgttgcccgctctctcccggaagcagaggacggtgctggtcgtgtgtggcccggagcagaacggggcagtggggctggtctgtgcccggcacctgcgggtgtttgtaagtagcaaggaccccttcgacctcccaaagtccctgcccctgcagaaatcactgccttcttttgatagcttcccagggggacattgacgcagggccaggttatagaatatgcccagtgcttgtcccaggcagggtctggtgctggtgaccaggtcaggggagtctgaccccctcttctcccacccccaggagtatgaacccaccatcttctaccccacacgctcgctggacctgctgcatcgggacctgaccacccagtgcgagaagatggacatccccttcctgagctacctgcccactgaggtcagcgctgggtggcaagcaagggggacatggtgtgcagtggccctgggccaccctgaccctgcctgccttccccaggtgcagctcattaacgaagcctatgggctggtggtggatgccgtactgggccccggcgtggagccgggcgaggtcgggggcccctgcacccgcgcgctggccacgctcaagctgctgtccatccccctcgtgagcctggacatcccctcaggcatgccaggcagaggggggcacattggggcctggggggcttgggtggaggcccctgtgccccagctcctggtcgcccctgcctgtctgaacctcaatctccccagcttggatggacccacacttggctgaggctaagggtcacacccatccctctgatggggaagatcgaggctgccaccccaggtgaccccaggtctcctctttcctccaccccagtgcccagcccacatgccctctgcccacccctggcccagttgcctgggcagacgtgagctcactcggcaaaggccgcgcccgccctggctgccgccccatgcctgttggaaccattaggcgacaggcagacggaacaaacagccgctggccagccggaccctccgtgggggtggctggactccgggggatgtcccctggctctcgggatcccagggacatcccagcaggtgccacagagcaggggcaccaagggaggcggcgtgctgtctgatctgagtagggaggctgcaggctcagcctaggacagagagggtggctctgtcaggtcagaggggatggttaggaacctctagtctgagggtggtggctagggtcagagaaggattaaagtctgagggaggatccagtgtcttctggtgagtggccccagaatcaagtcagagataggagagaaggcaaggctcctaggctgaaagtggaggctcattcaagaggtgacggaggctgggtgcaggggtcacacctgtaatcccagcactttgggaggtcgaggtgggcgggtcacctgatgtcaggagttccagaccagcctggccaacatggcgaaacccagtctctacaaaatacaaacatttgctgggtgtagtggtgcacgcctgtagtcctagttacttgggaggctgaggcaggagaatcgcttgaacccgggaggcagaggttgctgtgagctgagatcgtgccactgcactccagcctgggcaatagagagagactgtatcttaaaaacaaacaggctgggcgcaatggctcacacccataatcctagcactttgggaggccgaggtgggcagatcacaaggtcaggagttcgagaccagcctggccaatatggtgaaactccatctctactaaatatacaaaaattagccaggcatggtggcgtgtgcctgtagtcccagctactcgggaggctgagacaggagaattgcttgaacccgtgtggcagaggttgcagtgagccgagattgcaccattgcactccagcctgggtgactgaagacagaggctgggtcagatggaggagggcgattgaatagtaggataggagcagaagcagaaagtctgagtgcagaagctctggtctgattgggagggaaacacctccaaggactgggagagacttgtctgagggcggaggcagagttctagggggcgacaagtctcaccaggacccatgtgccagagagaaaaggctgggtctgatgggggaggggaagtgggggtggggcagcaggactctggtctgagggcagaggctcagtgttggaggggagaggagaggaggcagggacaggatggactctaggctgagggcaggccaccctcccagttcccaatccccccggaccctcctccctcaggctgggacgcagagaccggcagcgattcggaggacgggctgcggcctgacgtgctggtgtctctcgcggcgcccaagcgctgcgctggccgcttctccgggcgccaccacttcgtggccggcaggttcgtgcccgatgacgtgcgccgcaagttcgctctgcgcctgccgggatacacgggcaccgactgcgtcgcggcactgtgaccgccacccgcggccacaccgcagggaccctcgccaataaacagccctcccaccaccgccgcctcgcctccgcctcctttgtgcaccgggcccgctgcgggggtgggcacactcgaagagggacttcacacggtccctgggtgatccaaggcggggagcatgagaagggcggtggagtgggacttcccgctggcctagaaaacttcagctagggctgggggcggtggctcctgcctgtaatctcagcactttgggaggctgaggctggaggatcgcttaaggccaggagtttgggaccagcctgggcaacatagcaagatcccgactctacaaattaaaagaaaaagaagaaagaaaactcgagccagaagaatggagggtagattcagggtgggactcccagactgtttggggtggcctaaagcctataggatcgaagtgagacgcgagacaggacttccagccacctaaagcgggtccgagcagcttgaggctggattccaagtgacacttccctcaggcagcttgggatgcagcttggaggactgagtgggctcggggagggagttccagcaggccacggggaacccaggacagcctgaggacggaggcacagccagacgcaccaaggggggcgacccagaggggttgctcgagcgccgtcacccagggccagggggcgtggcctgaatggggcgtggccagggcgggatctgcggtcgcatcccgcccccactctcagtcccagcggccgccagacccgccggagttggacccgagcacgccgcggagcccggaccctccctcggacgctctgccccggccatggcgtcgctgctgccactgctctgtctctgtgtcgtcgctgcgcacctggcgggggcccgaggtgaggcgcctccagcccccgcgcccagcccctgaggctcccgagggcctggcagccggccttgggtgaagccgcactcggggagagaacccagggacccacgcgcttccccggggactgggtccccttcaccagtcggatccccgcgaccacctggggcgcggagcgggcctcatccattctcttccttggctaagccgggagtgtggataagaacctagggttcctcccggggtttggactctgaatcaccggccaggtctcccaccctggaccgaaggggtcggaactggcccctcccacctaactcccacacacgcactcactccaaccgctggagaaagaaatgcccatccctggaacactcaatggggcgggggacgggcccacttctcaagtgaggagactgaggcacccagaaggaaggggcttgtctgacctcatcactctgctgggagtatcttggacagctcctatcttggagaagccagtctagattccaaggacttcccggcagctcggactgtagtacagggatggaagacagactaagggaggggcttccagcaggccaagtggatgagggggagcccagcctgagggcagaggcacagccagctgaacttgattgatctcgcggcagctgaacatagtgggagggagactctagcctaggggaactgggtggtacttgcacttccccagccggggggttagggctaggtcagagagaggtacctggctttgggggcctggtggtggtcatgggcagcgcgctggaggagagtgtatgg
